(19) United States
(12) Patent Application Publication
(10) Pub. No.: US 2024/0002820 A1
(43) Pub. Date: Jan. 4, 2024

(54) Polynucleotides, Compositions, and Methods for Genome Editing Involving Deamination

(71) Applicant: Intellia Therapeutics, Inc., Cambridge, MA (US)

(72) Inventors: Christian Dombrowski, Auburndale, MA (US); William Frederick Harrington, Cambridge, MA (US); Ruan Oliveira, Cambridge, MA (US)

(73) Assignee: Intellia Therapeutics, Inc., Cambridge, MA (US)

(21) Appl. No.: 18/332,335

(22) Filed: Jun. 9, 2023

Related U.S. Application Data
(63) Continuation of application No. PCT/US2021/062922, filed on Dec. 10, 2021.
(60) Provisional application No. 63/275,424, filed on Nov. 3, 2021.
(60) Provisional application No. 63/165,636, filed on Mar. 24, 2021.
(60) Provisional application No. 63/130,104, filed on Dec. 23, 2020.
(60) Provisional application No. 63/124,060, filed on Dec. 11, 2020.

(51) Int. Cl. C12N 9/22; C12N 9/78; C12N 15/10; C12N 15/63

(52) U.S. Cl. CPC C12N 9/22; C12N 9/78; C12N 2310/20; C12N 15/63; C12Y 305/04005; C12N 15/102

(57) ABSTRACT

Polynucleotides, polypeptides, compositions, and methods for genome editing using deamination are provided. An mRNA containing an open reading frame (ORF) encoding a polypeptide is provided herein. The polypeptide includes a cytidine deaminase and an RNA-guided nickase, and does not include a uracil glycosylase inhibitor (UGI). A composition provided herein may include two different mRNAs. The first mRNA includes an ORF encoding a cytidine deaminase and an RNA-guided nickase, and the second mRNA includes an ORF encoding uracil glycosylase inhibitor (UGI).

[0001] This application is a Continuation of International Application No. PCT/US2021/062922, filed Dec. 10, 2021, which claims the benefit under 35 U.S.C. 119(e) of U.S. Provisional Application No. 63/124,060, filed Dec. 11, 2020; U.S. Provisional Application No. 63/130,104, filed Dec. 23, 2020; U.S. Provisional Application No. 63/165,636, filed Mar. 24, 2021; and U.S. Provisional Application No. 63/275,424, filed Nov. 3, 2021, each of which is herein incorporated by reference in its entirety.

[0002] This application is filed with a Sequence Listing in electronic format. The Sequence Listing is provided as a file entitled “01155-0016-00US_ST26.XML” created on Jun. 9, 2023, which is 2,996,760 bytes in size. The information in the electronic format of the sequence listing is incorporated herein by reference in its entirety.

### INTRODUCTION AND SUMMARY

[0003] The present disclosure relates to polynucleotides, compositions, and methods for genomic editing involving deamination.

[0004] Base editing is a genome editing method that directly generates point mutations within a specific region of the genomic DNA without causing double-stranded breaks (DSB). DNA base editors (BEs) comprise fusions between a catalytically impaired Cas nuclease and a base-modification enzyme. Currently, effectors for cytidine-to-thymidine (C-to-T) editing fuse a cytidine deaminase with a nickase and a uracil glycosylase inhibitor (UGI). For example, base editor 3 (BE3) consists of a Cas9 nuclease bearing a mutation that converts it into a nickase (nCas9), fused to an APOBEC1 (apolipoprotein mRNA editing enzyme, catalytic polypeptide 1) deaminase and a UGI (e.g., Wang et al. Cell Research 27:1289-1292 (2017)), and it was reported that an “nCas9-fused UGI domain is still important for achieving high fidelity of base editing, even when high levels of free UGI is present.” As another example, an engineered human APOBEC3A (A3A or apolipoprotein mRNA editing enzyme, catalytic polypeptide 3A) deaminase has been investigated as a replacement for rat APOBEC1 deaminase (RAPO1) in the original BE3 (Gehrke et al., Nature Biotechnology, 36: 977-982 (2018)), but it was noted that the ability of base editors “to edit all Cs within their editing window can potentially have deleterious effects” and that “mutation of the N57 residue in the human A3A deaminase was critical to restoring its native target sequence precision in the context of a base editor and also to lowering its off-target editing activity.” Indeed, APOBEC3A-Class 2 Cas nickase (D10A) base editors have been reported as having a “high degree of mutagenicity” and as showing Cas9-independent off-target base editing (Doman et al., Nature Biotechnology 38:620-628 (2020)). Accordingly, improved compositions and methods for targeted C-to-T base editing using cytidine deaminases (e.g., an APOBEC3A deaminase) and RNA-guided nickase are needed.

[0005] Accordingly, the present disclosure provides polynucleotides, compositions, and methods for genomic editing involving a cytidine deaminase (e.g., an APOBEC3A deaminase) and an RNA-guided nickase that induce C-to-T conversions at target nucleotides with greater fidelity and may minimize bystander mutations. The present disclosure is based in part on the findings that by pairing a cytidine deaminase (e.g., an APOBEC deaminase) and an RNA-guided nickase system with UGI in trans (e.g., as a separate mRNA), it is possible to lower the amount of other base editing (C-to-A/G conversions, insertions, or deletions) and increase the purity of C-to-T editing.

[0006] Accordingly, the following embodiments are provided.

[0007] In some embodiments, a composition is provided, the composition comprising a first mRNA comprising a first open reading frame encoding a polypeptide comprising a cytidine deaminase and an RNA-guided nickase, and a second mRNA comprising a second open reading frame encoding a uracil glycosylase inhibitor (UGI), wherein the second mRNA is different from the first mRNA. In some embodiments, the first open reading frame does not comprise a sequence encoding a UGI. In some embodiments, the composition comprises a first composition and a second composition, wherein the first composition comprises a first mRNA comprising a first open reading frame encoding a polypeptide comprising a cytidine deaminase and an RNA-guided nickase and does not comprise a uracil glycosylase inhibitor (UGI), and the second composition comprises a second mRNA comprising a second open reading frame encoding a uracil glycosylase inhibitor (UGI), wherein the second mRNA is different from the first mRNA. In some embodiments, the composition comprises lipid nanoparticles.

[0008] In some embodiments, a method of modifying a target gene is provided, the method comprising delivering to a cell a first mRNA comprising a first open reading frame encoding a first polypeptide comprising a cytidine deaminase and an RNA-guided nickase, a second mRNA comprising a second open reading frame encoding a uracil glycosylase inhibitor (UGI), wherein the second mRNA is different from the first mRNA, and at least one guide RNA (gRNA).

[0009] In some embodiments, a method of modifying at least one cytidine within a target gene in a cell is provided, the method comprising expressing in the cell or contacting the cell with: (i) a first polypeptide comprising a cytidine deaminase and an RNA-guided nickase, wherein the first polypeptide does not comprise a uracil glycosylase inhibitor (UGI); (ii) a UGI polypeptide; and (iii) at least one guide RNA (gRNA) wherein the first polypeptide and gRNA form a complex with the target gene and modify the at least one cytidine in the target gene. In some embodiments, the ratio of the UGI polypeptide to the first polypeptide is from 10:1 to 50:1.

[0010] In some embodiments, an mRNA containing an open reading frame (ORF) encoding a polypeptide is provided, the polypeptide comprising a cytidine deaminase (e.g., an APOBEC3A deaminase (A3A)) and an RNA-guided nickase, wherein the polypeptide does not comprise a uracil glycosylase inhibitor (UGI). The polypeptide encoded by the mRNA is also provided. In some embodiments, a method of modifying a target gene is provided, the method comprising delivering an mRNA or a polypeptide described herein to a cell.

[0011] In some embodiments, a composition comprises two different mRNAs in which the first mRNA comprises an ORF encoding a cytidine deaminase (e.g., A3A) and an RNA-guided nickase, and the second mRNA comprises an ORF encoding uracil glycosylase inhibitor (UGI). In some embodiments, the first mRNA in the composition does not comprise an ORF encoding UGI. In some embodiments, the molar ratio of the second mRNA to the first mRNA is from 1:1 to 30:1, from 2:1 to 30:1, from 7:1 to 22:1. In some embodiments, the molar ratio of the second mRNA to the first mRNA is 22:1, 7:1, 2:1, or 1:1, 1:4, 1:11, or 1:33.

[0012] Further embodiments are provided throughout and described in the claims and Figures.

### BRIEF DESCRIPTION OF THE DRAWINGS

[0013] FIGS. 1A-1E show C-to-T conversion activity deaminase editors profiled against 5 different guide targeting sequences, respectively.

[0014] FIG. 2A shows the percentage of edited reads with the 4 target cytosines converted to thymidines for deaminase editors profiled using sg000296.

[0015] FIG. 2B shows the percentage of edited reads with the 5 target cytosines converted to thymidines for deaminase editors profiled using sg0001373.

[0016] FIG. 2C shows the percentage of edited reads with the 4 target cytosines converted to thymidines for deaminase editors profiled using sg001400.

[0017] FIG. 2D shows the percentage of edited reads with the 6 target cytosines converted to thymidines for deaminase editors profiled using sg003018.

[0018] FIG. 2E shows the percentage of edited reads with at least 6 of 8 target cytosines converted to thymidines for deaminase editors profiled using sg005883.

[0019] FIG. 3A-3E show the percentage of C-to-T conversion by base position for 5 different guide targeting sequences, respectively.

[0020] FIGS. 4A-4B show editing profile as a percentage of total reads in U-2OS cells (FIG. 4A) and HuH-7 cells (FIG. 4B).

[0021] FIGS. 5A-5B show editing profile as a percentage of edited reads in U-2OS cells (FIG. 5A) and HuH-7 cells (FIG. 5B).

[0022] FIGS. 6A-6B represent editing profile as a percentage of total reads upon titrating UGI mRNAs (SEQ ID NOs: 25 and 34).

[0023] FIG. 7 shows TTR editing levels in CD-1 mice treated with different LNP combinations with mRNA constructs and sgRNAs. FIG. 7 shows % editing of C-to-T conversions, C-to-A/G conversions, and indels of DNA sequences (NGS sequencing) extracted from liver tissue samples harvested from the CD-1 mice.

[0024] FIG. 8 shows TTR editing levels in liver tissue harvested from CD-1 mice treated with different LNP combinations with mRNA constructs and sgRNAs when the UGI sequence was delivered in trans (a separate mRNA).

[0025] FIG. 9A-9C show scatter plots representing statistically significant (p. adj.<0.05) differential gene expression events (black dots) in liver samples from mice treated with sgRNA G000282 and BC22n mRNA in the absence of UGI mRNA in trans (FIG. 9A), sgRNA G000282 and BC22n mRNA in the presence of UGI mRNA in trans (FIG. 9B) or Cas9 mRNA in the presence of UGI mRNA in trans (FIG. 9C).

[0026] FIG. 10 shows the editing profile in T cells following treatment with different mRNA constructs and CIITA-targeting sgRNAs.

[0027] FIG. 11 shows MHC class II negative cells assessed by flow cytometry analysis of T cells treated with different mRNA constructs and CIITA guide RNAs.

[0028] FIGS. 12A-12B show scatter plots showing statistically significant (*=p. adj.<0.05) differential gene expression events (black dots) in T cells treated with sgRNA G018076, UGI mRNA and either Cas9 mRNA (FIG. 12A) or BC22n mRNA (FIG. 12B).

[0029] FIGS. 13A-13B show scatter plots showing statistically significant (*=p. adj.<0.05) differential gene expression events (black dots) in T cells treated with sgRNA G018117, UGI mRNA and either Cas9 mRNA (FIG. 13A) or BC22n mRNA (FIG. 13B).

[0030] FIGS. 14A-14B show protein-protein interaction networks enriched among the list of differentially expressed genes in T cells treated with sgRNA G018076, UGI mRNA and either Cas9 mRNA (FIG. 14A) or BC22n mRNA (FIG. 14B).

[0031] FIGS. 15A-15B show protein-protein interaction networks enriched among the list of differentially expressed genes in T cells treated with sgRNA G018117, UGI mRNA and either Cas9 mRNA (FIG. 15A) or BC22 mRNA (FIG. 15B).

[0032] FIGS. 16A-16C show the editing profiles of T cells. Editing profiles in the on-target TRAC locus (FIG. 16A) in addition to 10 loci previously described as mutational hotspots in APOBEC-positive tumors (FIGS. 16B-16C).

[0033] FIGS. 17A-17E show the editing profiles of T cells when treated with varying levels of BC22n mRNA and Cas9 mRNAs. Cells were edited using sgRNAs G015995 (FIG. 17A), G016017 (FIG. 17B), G016206 (FIG. 17C), G018117 (FIG. 17D), or G016086 (FIG. 17E).

[0034] FIGS. 18A-18D show the editing profiles for T cells edited with four guides simultaneously using varying levels of BC22n mRNA or Cas9 mRNAs. The editing profile at each edited locus is represented separately: G015995 (FIG. 18A), G016017 (FIG. 18B), G016206 (FIG. 18C), G018117 (FIG. 18D).

[0035] FIGS. 19A-19I show phenotyping results as percent of cells negative for antibody binding with increasing total RNA for BC22n and Cas9 samples. FIG. 19A shows the percentage of B2M negative cells when B2M guide G015995 was used for editing. FIG. 19B shows the percentage of B2M negative cells when multiple guides were used for editing. FIG. 19C shows the percentage of CD3 negative cells when TRAC guide G016017 was used for editing. FIG. 19D shows the percentage of CD3 negative cells when TRBC guide G016206 was used for editing. FIG. 19E shows the percentage of CD3 negative cells when multiple guides were used for editing. FIG. 19F shows the percentage of MHC Class II negative cells when CIITA guide G018117 was used for editing. FIG. 19G shows the percentage of MHC Class II negative cells when multiple guides were used for editing. FIG. 19H shows the percentage of triple (B2M, CD3, MHC II) negative cells when multiple guides were used for editing. FIG. 19I shows the percentage of MHC class II negative T cells when CIITA guide G016086 was used for editing.

[0036] FIGS. 20A-20C show the editing profile for T cells while using varying levels of UGI mRNA in trans with various editor mRNAs. FIG. 20A shows the percent editing with BC22n mRNA at 27.3 nM. FIG. 20B shows the percent editing with BC22-2×UGI mRNA at 24.7 nM. FIG. 20C shows the percent editing with BE4Max mRNA at 24.0 nM.

[0037] FIG. 21 shows C-to-T conversion as a percentage of edited reads while using varying levels of UGI mRNA in trans with various editor mRNAs (BC22n at 27.3 nM, BC22-2×UGI at 24.7 nM, BE4Max at 24.0 nM).

[0038] FIG. 22 shows the mean percentage of T cells negative for cell surface expression of MHC II (% MHC II negative”) for several guides using Cas9 or BC22 in relation to the distance between the cut site boundary nucleotide shown as base pairs (“bp”). Positive numerical values indicate a splice site boundary nucleotide 3′ of the cut site, whereas the negative numerical values indicate a splice site boundary nucleotide 5′ of the cut site.

[0039] FIG. 23A shows an exemplary sgRNA (SEQ ID NO: 141, methylation not shown) in a possible secondary structure with labels designating individual nucleotides of the conserved region of the sgRNA, including the lower stem, bulge, upper stem, nexus (the nucleotides of which can be referred to as N1 through N18, respectively, in the 5′ to 3′ direction), and the hairpin region which includes hairpin 1 and hairpin 2 regions. A nucleotide between hairpin 1 and hairpin 2 is labeled n. A guide region may be present on an sgRNA and is indicated in this figure as “(N)x” preceding the conserved region of the sgRNA.

[0040] FIG. 23B labels the 10 conserved region YA sites in an exemplary sgRNA sequence (SEQ ID NO: 141, methylation not shown) from 1 to 10. The numbers 25, 45, 50, 56, 64, 67, and 83 indicate the position of the pyrimidine of YA sites 1, 5, 6, 7, 8, 9, and 10 in an sgRNA with a guide region indicated as (N)z, e.g., wherein x is optionally 20.

[0041] FIGS. 24A-B show results for efficiency of three CIITA guides (G016086, G016092, and G016067) for editing T cells with BC22. FIG. 24A shows the percent C-to-T conversion. FIG. 24B shows the percentage of MHC class II negative T cells.

[0042] FIG. 25 shows the percentage of B2M negative T cells after editing with different mRNA combinations. EP indicates electroporation.

[0043] FIG. 26 shows the percentage of single nucleotide variants (SNVs) that are C-to-U conversions in the transcriptome of T cells edited at B2M with different mRNA combinations (n.s.=not significant).

[0044] FIG. 27 shows the percentage of B2M negative T cells after-treatment with different mRNA combinations.

[0045] FIG. 28 shows the editing profiles at B2M locus in T cells after-treatment with different mRNA combinations.

[0046] FIG. 29 shows the percentage of SNVs that are C-to-T conversions in amplified genomic DNA from single T cells edited at B2M with different mRNA combinations (n.s.=not significant).

[0047] FIG. 30 shows the percentage of B2M negative eHap1 cells following editing with different mRNA combinations.

[0048] FIG. 31 shows the editing profiles of the B2M locus in eHap1 cells following treatment with different mRNA combinations.

[0049] FIG. 32 shows the percentage of SNVs that are C-to-T conversions in clonally expanded eHap1 cells editing at B2M with different mRNA combinations (n.s.=not statistically significant).

[0050] FIG. 33 shows the cell viability relative to untreated cells following electroporation or LNP delivery of BC22n or Cas9 editors and single or multiple guides.

[0051] FIG. 34 shows the total γH2AX spot intensity per nuclei following electroporation or LNP delivery of BC22n or Cas9 editors and single or multiple guides.

[0052] FIG. 35 shows the percentage editing at loci of interest following LNP delivery of BC22n or Cas9 editors and single or multiple guides.

[0053] FIG. 36 shows the percentage of negative cells for stated surface proteins following LNP delivery of BC22n or Cas9 editors and single or multiple guides.

[0054] FIG. 37 shows the percentage of interchromosomal translocations among total unique molecules following LNP delivery of BC22n or Cas9 editors and multiple guides.

[0055] FIG. 38 shows mean percent editing in mouse liver following treatment with various base editors.

[0056] FIG. 39 shows mean percent C-to-T conversion activity for base editor constructs designed with various deaminase domains.

[0057] FIGS. 40A-40K show percent of total reads containing at least 1 C to T conversion for base editing constructs designed with various linkers.

[0058] FIG. 41 shows mean percent editing at SERPINA1 in Huh-7 after treatment with base editor constructs designed using various linkers.

[0059] FIG. 42 shows EC90 for base editing mRNA designed with various linkers. The 95% confidence interval (CI) for each EC90 value is also shown.

[0060] FIG. 43 shows mean percent editing at the ANAPC5 locus in PHH using base editing constructs designed with various linkers.

[0061] FIG. 44 shows EC95 for base editing mRNA designed with various linkers. The 95% confidence interval (CI) for each EC95 value is also shown.

[0062] FIG. 45 shows mean percent editing at the TRAC locus in PHH using base editing constructs designed with various linkers.

[0063] FIG. 46 shows Mass of base editor mRNAs designed with various linkers that leads to 90% of the maximum (EC90) knockdown of CD3. The 95% confidence interval for each EC50 value is also shown.

[0064] FIG. 47 shows the mass of BC22n mRNAs designed with various linkers that leads to 90% of the maximum (EC90) knockdown of CD3, HLA-A3 and HLA-DR, DP, DQ (EC50). The 95% confidence interval (CI) for each EC50 value is also shown.

[0065] FIG. 48 shows mean percent editing at the TRAC locus in T cells treated with sgRNA in the 100-mer or 91-mer formats.

[0066] FIG. 49A shows mean percent editing at the TRBC1 locus in T cells treated with sgRNA in the 100-mer or 91-mer formats.

[0067] FIG. 49B shows mean percent editing at the TRBC2 locus in T cells treated with sgRNA in the 100-mer or 91-mer formats.

[0068] FIG. 50 shows mean percent editing at the CIITA locus in T cells treated with sgRNA in the 100-mer or 91-mer formats.

[0069] FIG. 51 shows mean percent editing at the B2M locus in T cells treated with sgRNA in the 100-mer or 91-mer formats.

[0070] FIG. 52 shows mean percent editing at the CD38 locus in T cells treated with sgRNA in the 100-mer or 91-mer formats.

[0071] FIG. 53A shows the mean percentage of CD8+ T cells that are negative for CD3 surface receptors following treatment with sgRNAs in the 100-mer or 91-mer formats targeting TRAC.

[0072] FIG. 53B shows the mean percentage of CD8+ T cells that are negative for CD3 surface receptors following treatment with sgRNAs in the 100-mer or 91-mer formats targeting TRBC.

[0073] FIG. 54A shows the mean percentage of CD8+ T cells that are negative for HLA-DR, DP, DQ surface receptors following treatment with sgRNAs in the 100-mer or 91-mer formats targeting CIITA.

[0074] FIG. 54B shows the mean percentage of CD8+ T cells that are negative for HLA-A surface receptors following treatment with sgRNAs in the 100-mer or 91-mer formats targeting HLA-A.

[0075] FIG. 55A shows the mean percentage of CD8+ T cells that are negative for B2M surface receptors following treatment with sgRNAs in the 100-mer or 91-mer formats targeting B2M.

[0076] FIG. 55B shows the mean percentage of CD8+ T cells that are negative for CD38 surface receptors following treatment with sgRNAs in the 100-mer or 91-mer formats targeting CD38.

[0077] FIG. 56 shows mean percent editing at the ANAPC5 locus in mouse liver with increasing amounts of UGI mRNA.

[0078] FIG. 57 shows percent C to T editing purity at the ANAPC5 locus in mouse liver following editing with increasing amounts of UGI mRNA.

[0079] FIG. 58A shows total editing at different BC22n-HiBiT mRNA concentrations at B2M in PHH cells.

[0080] FIG. 58B shows C-to-T purity at different UGI-HiBiT mRNA concentrations at B2M in PHH cells.

[0081] FIG. 58C shows total editing at different BC22-2×UGI-HiBiT mRNA concentrations at B2M in PHH cells.

[0082] FIG. 58D shows C-to-T purity at different BC22-2×UGI-HiBiT mRNA concentrations at B2M in PHH cells.

[0083] FIG. 59A shows total editing at different BC22n-HiBiT mRNA concentrations in T cells.

[0084] FIG. 59B shows C-to-T purity at different UGI-HiBiT mRNA concentrations in T cells.

[0085] FIG. 59C shows total editing at different BC22-2×UGI-HiBiT mRNA concentrations in T cells.

[0086] FIG. 59D shows C-to-T purity at different BC22-2×UGI-HiBiT mRNA concentrations in T cells.

[0087] FIG. 60 shows editing in liver tissue harvested from CD-1 mice treated with LNPs with fixed doses of sgRNA and base editor mRNA and different doses of UGI mRNA.

[0088] FIG. 61 shows C-to-T purity in liver tissue harvested from CD-1 mice treated with LNPs with fixed doses of sgRNA and base editor mRNA and different doses of UGI mRNA.

[0089] FIG. 62 shows the percent lysis of T cells targeted by NK cells at different effector:target (E:T) ratios treated with sgRNA and base editor and UGI mRNAs.

[0090] FIG. 63 shows conversion rate at each guide nucleotide position for high activity guides edited with a Spy base editor.

[0091] FIG. 64 shows conversion rate at each guide nucleotide position for high activity guides edited with an Nme2 base editor.

BRIEF DESCRIPTION OF DISCLOSED SEQUENCES

| SEQ ID | |
|---|---|
| NO | Description |
| 1 | mRNA encoding BC22n |
| 2 | Open reading frame for BC22n |
| 3 | Amino acid sequence for BC22n |
| 4 | mRNA encoding BC22n with HiBit tag |
| 5 | Open reading frame for BC22n with HiBit tag |
| 6 | Amino acid sequence for BC22n with HiBit tag |
| 7 | Not used |
| 8 | Open reading frame for Cas9 |
| 9 | Amino acid sequence for Cas9 |
| 10 | Not used |
| 11 | Open reading frame for Cas9 |
| 12 | Amino acid sequence for Cas9 |
| 13 | mRNA encoding BE3 |
| 14 | Open reading frame for BE3 |
| 15 | Amino acid sequence for BE3 |
| 16 | mRNA encoding BE3 |
| 17 | Open reading frame for BE3 |
| 18 | Amino acid sequence for BE3 |
| 19 | mRNA encoding BC22 |
| 20 | Open reading frame for BC22 |
| 21 | Amino acid sequence for BC22 |
| 22 | Not used |
| 23 | Open reading frame for Cas9 with HiBit tag |
| 24 | Amino acid sequence for Cas9 with HiBit tag |
| 25 | mRNA encoding UGI |
| 26 | Open reading frame for UGI |
| 27 | Amino acid sequence for UGI |
| 28 | mRNA encoding BC22 with 2x UGI |
| 29 | Open reading frame for BC22 with 2x UGI |
| 30 | Amino acid sequence for BC22 with 2x UGI |
| 31 | mRNA encoding BE4MAX protein |
| 32 | Open reading frame for BE4MAX protein |
| 33 | Amino acid sequence for BE4MAX protein |
| 34 | mRNA sequence encoding UGI |
| 35 | Open reading frame for UGI |
| 36 | Amino acid sequence for recombinant Cas9 |
| 37 | Not used |
| 38 | Not used |
| 39 | Not used |
| 40 | Amino acid sequence of H. sapiens APOBEC3A deaminase (A3A) |
| 41 | Amino acid sequence of R. norvegicus APOBEC1 |
| 42 | Exemplary coding sequence for UGI (SEQ ID NO. 43) |
| 43 | Amino acid sequence for exemplary UGI |
| 44 | Exemplary coding sequence for XTEN (SEQ ID NO. 46) |
| 45 | Exemplary coding sequence for XTEN (SEQ ID NO. 46) |
| 46 | Amino acid sequence for exemplary XTEN |
| 47 | Amino acid sequence for exemplary XTEN |
| 48 | Amino acid sequence for exemplary XTEN |
| 49 | Amino acid sequence for exemplary linker |
| 50 | Amino acid sequence for exemplary linker |
| 51 | Amino acid sequence for exemplary linker |
| 52 | Amino acid sequence for exemplary linker |
| 53 | Amino acid sequence for exemplary linker |
| 54 | Amino acid sequence for exemplary linker |
| 55 | Amino acid sequence for exemplary linker |
| 56 | Amino acid sequence for exemplary linker |
| 57 | Amino acid sequence for exemplary linker |
| 58 | Amino acid sequence for exemplary linker |
| 59 | Amino acid sequence for exemplary linker |
| 60 | Nucleic acid sequence for exemplary linker |
| 61 | Amino acid sequence for exemplary linker |
| 62 | Nucleic acid sequence for SV40 NLS |
| 63 | Amino acid sequence for SV40 NLS |
| 64 | pCI-Neo |
| 65 | Screening plasmid-invariant sequence |
| 66 | pUC19 |
| 67 | U6 promoter |
| 68 | CMV promoter |
| 69 | 3′ UTR from human albumin gene |
| 70 | Amino acid sequence of Spy Cas9 nickase (D10A) with 1x NLS as the C- |
| | terminal 7 amino acids |
| 71 | Spy Cas9 nickase (D10A) ORF encoding SEQ ID NO: 70 using minimal |
| | uridine codons as listed in Table 3, with start and stop codons |
| 72 | Spy Cas9 nickase (D10A) ORF coding sequence using minimal uridine codons |
| | as listed in Table 3 (no start or stop codons; suitable for inclusion in fusion |
| | protein coding sequence) |
| 73 | Amino acid sequence of Spy Cas9 nickase (without NLS) |
| 74 | Spy Cas9 nickase ORF encoding SEQ ID NO: 73 using minimal uridine |
| | codons as listed in Table 3, with start and stop codons |
| 75 | Spy Cas9 nickase coding sequence encoding SEQ ID NO: 73 using minimal |
| | uridine codons as listed in Table 3 (no start or stop codons; suitable for |
| | inclusion in fusion protein coding sequence) |
| 76 | Amino acid sequence of Spy Cas9 nickase with two nuclear localization |
| | signals as the C-terminal amino acids |
| 77 | Spy Cas9 nickase ORF encoding SEQ ID NO: 76 using minimal uridine |
| | codons as listed in Table 3, with start and stop codons |
| 78 | Spy Cas9 nickase coding sequence encoding SEQ ID NO: 76 using minimal |
| | uridine codons as listed in Table 3 (no start or stop codons; suitable for |
| | inclusion in fusion protein coding sequence) |
| 79 | Spy Cas9 nickase ORF using low A codons of Table 4, with start and stop codons |
| 80 | Spy Cas9 nickase ORF using low A codons of Table 4, with start and stop |
| | codons and no NLS |
| 81 | Spy Cas9 nickase ORF using low A codons of Table 4, with two C-terminal |
| | NLS sequences and start and stop codons |
| 82 | Spy Cas9 nickase ORF using low A/U codons of Table 4, with start and stop codons |
| 83 | Spy Cas9 nickase ORF using low A/U codons of Table 4, with two C-terminal |
| | NLS sequences and start and stop codons |
| 84 | Spy Cas9 nickase ORF using low A/U codons of Table 4, with start and stop |
| | codons and no NLS |
| 85 | Spy Cas9 nickase ORF using low A codons of Table 4 (no start or stop |
| | codons; suitable for inclusion in fusion protein coding sequence) |
| 86 | Spy Cas9 nickase ORF using low A codons of Table 4 (no NLS and no start or |
| | stop codons; suitable for inclusion in fusion protein coding sequence) |
| 87 | Spy Cas9 nickase ORF using low A codons of Table 4, with two C-terminal |
| | NLS sequences (no start or stop codons; suitable for inclusion in fusion protein |
| | coding sequence) |
| 88 | Spy Cas9 nickase ORF using low A/U codons of Table 4 (no start or stop |
| | codons; suitable for inclusion in fusion protein coding sequence) |
| 89 | Spy Cas9 nickase ORF using low A/U codons of Table 4, with two C-terminal |
| | NLS sequences (no start or stop codons; suitable for inclusion in fusion protein |
| | coding sequence) |
| 90 | Spy Cas9 nickase ORF using low A/U codons of Table 4 (no NLS and no start |
| | or stop codons; suitable for inclusion in fusion protein coding sequence) |
| 91 | Exemplary 5′ UTR |
| 92 | Exemplary 5′ UTR |
| 93 | Exemplary 5′ UTR |
| 94 | Exemplary 5′ UTR |
| 95 | Exemplary 5′ UTR |
| 96 | Exemplary 5′ UTR |
| 97 | Exemplary 5′ UTR |
| 98 | Exemplary 5′ UTR |
| 99 | Exemplary 3′ UTR |
| 100 | Exemplary 3′ UTR |
| 101 | Exemplary 3′ UTR |
| 102 | Exemplary 3′ UTR |
| 103 | Exemplary 3′ UTR |
| 104 | Exemplary 3′ UTR |
| 105 | Exemplary 3′ UTR |
| 106 | Exemplary 3′ UTR |
| 107 | Exemplary Kozak sequence |
| 108 | Exemplary Kozak sequence |
| 109 | Exemplary poly-A sequence |
| 110 | Exemplary NLS 1 |
| 111 | Exemplary NLS 2 |
| 112 | Exemplary NLS 3 |
| 113 | Exemplary NLS 4 |
| 114 | Exemplary NLS 5 |
| 115 | Exemplary NLS 6 |
| 116 | Exemplary NLS 7 |
| 117 | Exemplary NLS 8 |
| 118 | Exemplary NLS 9 |
| 119 | Exemplary NLS 10 |
| 120 | Exemplary NLS 11 |
| 121 | Alternative SV40 NLS |
| 122 | Nucleoplasmin NLS |
| 123 | Exemplary coding sequence for SV40 NLS |
| 124 | Exemplary coding sequence for NLS1 |
| 125 | Exemplary coding sequence for NLS2 |
| 126 | Exemplary coding sequence for NLS3 |
| 127 | Exemplary coding sequence for NLS4 |
| 128 | Exemplary coding sequence for NLS5 |
| 129 | Exemplary coding sequence for NLS6 |
| 130 | Exemplary coding sequence for NLS7 |
| 131 | Exemplary coding sequence for NLS8 |
| 132 | Exemplary coding sequence for NLS9 |
| 133 | Exemplary coding sequence for NLS10 |
| 134 | Exemplary coding sequence for NLS11 |
| 135 | Exemplary coding sequence for alternate SV40 NLS |
| 136-138 | Not used |
| 139 | Exemplary nucleotide sequence following the 3′ end of the guide sequence to |
| | form a crRNA |
| 140 | Conserved Portion of a spy Cas9 sgRNA |
| 141 | Modified sgRNA pattern, where N are nucleotides encoding a guide sequence |
| 142 | Exemplary guide constant region modification pattern (G282-C) |
| 143 | Exemplary guide modification pattern (G282-mN3Nx) |
| 144 | Exemplary guide modification pattern (G282-Nx) |
| 145 | Exemplary guide modification pattern (G282-N20) |
| 146-150 | Not used |
| 151 | Exemplary guide sequence |
| 152 | Exemplary guide sequence for B2M gene |
| 153 | Exemplary guide sequence for TTR gene |
| 154 | Exemplary guide sequence for TRAC gene |
| 155 | Exemplary guide sequence for TRBC1/2 gene |
| 156 | Exemplary guide sequence |
| 157 | Exemplary guide sequence for SERPINAl gene |
| 158 | Exemplary guide sequence for SERPINAl gene |
| 159 | Exemplary guide sequence |
| 160 | Exemplary guide sequence for CIITA gene |
| 161 | Exemplary guide sequence for CIITA gene |
| 162 | Exemplary guide sequence for CIITA gene |
| 163 | Exemplary guide sequence for CIITA gene |
| 164 | Exemplary guide sequence for CIITA gene |
| 165 | Exemplary guide sequence for CIITA gene |
| 166 | Exemplary guide sequence for CIITA gene |
| 167 | Exemplary guide sequence for CIITA gene |
| 168 | Exemplary guide sequence for CIITA gene |
| 169 | Exemplary guide sequence for CIITA gene |
| 170 | Exemplary guide sequence for CIITA gene |
| 171 | Exemplary guide sequence for CIITA gene |
| 172 | Exemplary guide sequence for CIITA gene |
| 173 | Exemplary guide sequence for CIITA gene |
| 174-176 | not used |
| 177 | G013009 guide RNA targeting TRAC |
| 178 | G016016 guide RNA targeting TRAC |
| 179 | G015991 guide RNA targeting B2M |
| 180 | G015996 guide RNA targeting B2M |
| 181 | G000297 guide RNA |
| 182 | G015995 guide RNA targeting B2M with guide sequence SEQ ID NO: 152 |
| 183 | G000282 guide RNA targeting TTR with guide sequence SEQ ID NO: 153 |
| 184 | G016017 guide RNA targeting TRAC with guide sequence SEQ ID NO: 154 |
| 185 | G016206 guide RNA targeting TRBC1/2 with guide sequence SEQ ID NO: 155 |
| 186 | SG000296 guide RNA |
| 187 | SG001373 guide RNA targeting SERPINA1 with guide sequence SEQ ID NO: 157 |
| 188 | SG001400 guide RNA targeting SERPINA1 with guide sequence SEQ ID NO: 158 |
| 189 | SG005883 guide RNA |
| 190 | SG003018 guide RNA targeting CIITA with guide sequence SEQ ID NO: 160 |
| 191 | G018075 guide RNA targeting CIITA with guide sequence SEQ ID NO: 161 |
| 192 | G018076 guide RNA targeting CIITA with guide sequence SEQ ID NO: 162 |
| 193 | G018077 guide RNA targeting CIITA with guide sequence SEQ ID NO: 163 |
| 194 | G018078 guide RNA targeting CIITA with guide sequence SEQ ID NO: 164 |
| 195 | G018081 guide RNA targeting CIITA with guide sequence SEQ ID NO: 165 |
| 196 | G018082 guide RNA targeting CIITA with guide sequence SEQ ID NO: 166 |
| 197 | G018084 guide RNA targeting CIITA with guide sequence SEQ ID NO: 167 |
| 198 | G018085 guide RNA targeting CIITA with guide sequence SEQ ID NO: 168 |
| 199 | G018091 guide RNA targeting CIITA with guide sequence SEQ ID NO: 169 |
| 200 | G018100 guide RNA targeting CIITA with guide sequence SEQ ID NO: 170 |
| 201 | G018117 guide RNA targeting CIITA with guide sequence SEQ ID NO: 171 |
| 202 | G018118 guide RNA targeting CIITA with guide sequence SEQ ID NO: 172 |
| 203 | G018120 guide RNA targeting CIITA with guide sequence SEQ ID NO: 173 |
| 204-210 | Not used |
| 211 | Amino acid sequence for exemplary linker |
| 212 | Amino acid sequence for exemplary linker |
| 213 | Amino acid sequence for exemplary linker |
| 214 | Amino acid sequence for exemplary linker |
| 215 | Amino acid sequence for exemplary linker |
| 216 | Amino acid sequence for exemplary linker |
| 217 | Amino acid sequence for exemplary linker |
| 218 | Amino acid sequence for exemplary linker |
| 219 | Amino acid sequence for exemplary linker |
| 220 | Amino acid sequence for exemplary linker |
| 221 | Amino acid sequence for exemplary linker |
| 222 | Amino acid sequence for exemplary linker |
| 223 | Amino acid sequence for exemplary linker |
| 224 | Amino acid sequence for exemplary linker |
| 225 | Amino acid sequence for exemplary linker |
| 226 | Amino acid sequence for exemplary linker |
| 227 | Amino acid sequence for exemplary linker |
| 228 | Amino acid sequence for exemplary linker |
| 229 | Amino acid sequence for exemplary linker |
| 230 | Amino acid sequence for exemplary linker |
| 231 | Amino acid sequence for exemplary linker |
| 232 | Amino acid sequence for exemplary linker |
| 233 | Amino acid sequence for exemplary linker |
| 234 | Amino acid sequence for exemplary linker |
| 235 | Amino acid sequence for exemplary linker |
| 236 | Amino acid sequence for exemplary linker |
| 237 | Amino acid sequence for exemplary linker |
| 238 | Amino acid sequence for exemplary linker |
| 239 | Amino acid sequence for exemplary linker |
| 240 | Amino acid sequence for exemplary linker |
| 241 | Amino acid sequence for exemplary linker |
| 242 | Amino acid sequence for exemplary linker |
| 243 | Amino acid sequence for exemplary linker |
| 244 | Amino acid sequence for exemplary linker |
| 245 | Amino acid sequence for exemplary linker |
| 246 | Amino acid sequence for exemplary linker |
| 247 | Amino acid sequence for exemplary linker |
| 248 | Amino acid sequence for exemplary linker |
| 249 | Amino acid sequence for exemplary linker |
| 250 | Amino acid sequence for exemplary linker |
| 251 | Amino acid sequence for exemplary linker |
| 252 | Amino acid sequence for exemplary linker |
| 253 | Amino acid sequence for exemplary linker |
| 254 | Amino acid sequence for exemplary linker |
| 255 | Amino acid sequence for exemplary linker |
| 256 | Amino acid sequence for exemplary linker |
| 257 | Amino acid sequence for exemplary linker |
| 258 | Amino acid sequence for exemplary linker |
| 259 | Amino acid sequence for exemplary linker |
| 260 | Amino acid sequence for exemplary linker |
| 261 | Amino acid sequence for exemplary linker |
| 262 | Amino acid sequence for exemplary linker |
| 263 | Amino acid sequence for exemplary linker |
| 264 | Amino acid sequence for exemplary linker |
| 265 | Amino acid sequence for exemplary linker |
| 266 | Amino acid sequence for exemplary linker |
| 267 | Amino acid sequence for exemplary linker |
| 268 | Amino acid sequence for exemplary linker |
| 269 | Amino acid sequence for exemplary linker |
| 270 | Amino acid sequence for exemplary linker |
| 271 | Amino acid sequence for exemplary linker |
| 272 | Amino acid sequence for exemplary linker |
| 273-300 | Not Used |
| 301 | Exemplary mRNA encoding APOBEC3A-Nme2D16A |
| 302 | Exemplary open reading frame for APOBEC3A-Nme2D16A |
| 303 | Exemplary amino acid sequence for APOBEC3A-Nme2D16A |
| 304 | Exemplary mRNA encoding APOBEC3A-Nme2D16A |
| 305 | Exemplary open reading frame for APOBEC3A-Nme2D16A |
| 306 | Exemplary amino acid sequence for APOBEC3A-Nme2D16A |
| 307 | Exemplary mRNA encoding APOBEC3A-Nme2D16A |
| 308 | Exemplary open reading frame for APOBEC3A-Nme2D16A |
| 309 | Exemplary amino acid sequence for APOBEC3A-Nme2D16A |
| 310 | Exemplary mRNA encoding APOBEC3A-Nme2D16A |
| 311 | Exemplary open reading frame for APOBEC3A-Nme2D16A |
| 312 | Exemplary amino acid sequence for APOBEC3A-Nme2D16A |
| 313 | Exemplary amino acid sequence for NLS-NLS-APOBEC3A-L070-Nme2D16A |
| 314 | mRNA encoding BC22-2XUGI with a C-terminal HiBiT tag (BC22-2XUGI-HibIT) |
| 315 | mRNA encoding BC22-Nme2D16A (Nme2 BC22n) |
| 316 | mRNA encoding UGI with a C-terminal HiBiT tag (UGI-HiBiT) |
| 317-319 | Not Used |
| 320 | Amino acid sequence for Nme2Cas9 |
| 321-337 | Exemplary amino acid sequences for base editor with linker |
| 340 | mRNA encoding Nme2Cas9 |
| 341-357 | Exemplary mRNA sequences for base editor with linker |
| 360 | Open reading frame encoding Nme2Cas9 |
| 361-377 | Exemplary open reading frame sequences for base editor with linker |
| 378-386 | Not Used |
| 387 | Exemplary amino acid sequence for D16A Nme2Cas9 nickase |
| 388 | Exemplary coding sequence for D16A Nme2Cas9 nickase |
| 389 | Exemplary coding sequence for D16A Nme2Cas9 nickase |
| 390 | Exemplary coding sequence for D16A Nme2Cas9 nickase |
| 391 | Exemplary open reading frame for D16A Nme2Cas9 nickase |
| 392 | Exemplary open reading frame for D16A Nme2Cas9 nickase |
| 393 | Exemplary open reading frame for D16A Nme2Cas9 nickase |
| 394-400 | Not Used |
| 401-416 | Exemplary guide RNAs targeting HLA-A |
| 417 | Not Used |
| 418-422 | Exemplary guide RNAs targeting HLA-A |
| 423 | Not Used |
| 424 | Exemplary guide RNAs targeting HLA-A |
| 425-426 | Not Used |
| 429-435 | Exemplary guide RNAs targeting HLA-A |
| 436 | Not Used |
| 437-443 | Exemplary guide RNAs targeting HLA-A |
| 444 | Not Used |
| 445-453 | Exemplary guide RNAs targeting HLA-A |
| 454 | Not Used |
| 455-495 | Exemplary guide RNAs targeting HLA-A |
| 496 | G023522 Exemplary guide RNA Targeting CD38 gene |
| 497 | G019427 Exemplary guide RNA Targeting ANAPC5 |
| 498 | G023519 Exemplary guide RNA Targeting B2M |
| 499 | G023520 Exemplary guide RNA Targeting TRAC |
| 500 | G023521 Exemplary guide RNA Targeting CIITA |
| 501 | G023523 Exemplary guide RNA Targeting HLA-A |
| 502 | G023524 Exemplary guide RNA Targeting TRBC1/2 |
| 503 | G020073 Exemplary Nme2Cas9 guide RNA |
| 504 | G020927 Exemplary Nme2Cas9 guide RNA |
| 505 | G020928 Exemplary Nme2Cas9 guide RNA |
| 506 | G020929 Exemplary Nme2Cas9 guide RNA |
| 507 | G021237 Exemplary Nme2Cas9 guide RNA |
| 508 | G021249 Exemplary Nme2Cas9 guide RNA |
| 509 | G021321 Exemplary Nme2Cas9 guide RNA |
| 510 | G021844 Exemplary Nme2Cas9 guide RNA with non-peptide linker |
| 511 | G000502 Exemplary guide RNA targeting TTR |
| 512 | Exemplary NmeCas9 sgRNA |
| 513 | Conserved region of exemplary shortened NmeCas9 sgRNA |
| 514 | Conserved region of Exemplary shortened NmeCas9 sgRNA pattern |
| 515 | Conserved region of Exemplary shortened NmeCas9 sgRNA pattern |
| 516 | Conserved region of Exemplary shortened/modified NmeCas9 sgRNA pattern |
| | (Mod-77) |
| 517 | Conserved region of Exemplary shortened/modified NmeCas9 sgRNA |
| | comprising linkers (Mod-78) |
| 518 | Exemplary shortened NmeCas9 sgRNA comprising linkers |
| 519 | Exemplary shortened/modified NmeCas9 guide RNA comprising linkers |
| 520 | Exemplary shortened/modified SpyCas9 guide RNA |
| 521 | Exemplary shortened SpyCas9 guide RNA |
| 522 | Exemplary shortened/modified NmeCas9 guide RNA |
| 523 | Exemplary shortened/modified SpyCas9 guide RNA comprising linkers |
| 524 | Exemplary shortened SpyCas9 guide RNA comprising linkers |
| 525-528 | Not Used |
| 529 | G016788 Exemplary guide RNA |
| 530-617 | Exemplary guide RNAs targeting CIITA |
| 618-705 | Exemplary guide sequence for TRBC gene |
| 706-746 | Exemplary guide sequence for TRAC gene |
| 747-762 | Exemplary guide RNA sequence for TRAC gene |
| 763-800 | Not Used |
| 801-852 | Exemplary guide RNA sequences for TRBC gene |
| 853-868 | Exemplary guide RNA sequences for TRAC gene |
| 869-956 | Exemplary guide RNA for CD38 gene |
| 957-959 | Not used |
| 960-1023 | Exemplary amino acid sequences of cytidine deaminases |
| 1024-1075 | Exemplary guide RNA sequences for TRBC gene |
| 1076-1163 | Exemplary guide RNA sequences for CIITA gene |

See the Sequence Table below for the sequences themselves. Transcript sequences may generally include GGG as the first three nucleotides for use with ARCA or AGG as the first three nucleotides for use with CleanCap™. Accordingly, the first three nucleotides can be modified for use with other capping approaches, such as Vaccinia capping enzyme. Promoters and poly-A sequences are not included in the transcript sequences. A promoter such as a U6 promoter (SEQ ID NO: 67) or a CMV Promotor (SEQ ID NO: 68) and a poly-A sequence such as SEQ ID NO: 109 can be appended to the disclosed transcript sequences at the 5′ and 3′ ends, respectively. Most nucleotide sequences are provided as DNA but can be readily converted to RNA by changing Ts to Us.

### DETAILED DESCRIPTION OF CERTAIN EMBODIMENTS

[0093] Reference will now be made in detail to certain embodiments of the invention, examples of which are illustrated in the accompanying drawings. While the invention will be described in conjunction with the illustrated embodiments, it will be understood that they are not intended to limit the invention to those embodiments. On the contrary, the invention is intended to cover all alternatives, modifications, and equivalents, which may be included within the invention as defined by the appended claims.

[0094] Before describing the present teachings in detail, it is to be understood that the disclosure is not limited to specific compositions or process steps, as such may vary. It should be noted that, as used in this specification and the appended claims, the singular form “a”, “an” and “the” include plural references unless the context clearly dictates otherwise. Thus, for example, reference to “a conjugate” includes a plurality of conjugates and reference to “a cell” includes a plurality of cells and the like.

[0095] Numeric ranges are inclusive of the numbers defining the range. Measured and measurable values are understood to be approximate, taking into account significant digits and the error associated with the measurement. Also, the use of “comprise”, “comprises”, “comprising”, “contain”, “contains”, “containing”, “include”, “includes”, and “including” are not intended to be limiting. It is to be understood that both the foregoing general description and detailed description are exemplary and explanatory only and are not restrictive of the teachings.

[0096] The term “about” or “approximately” means an acceptable error for a particular value as determined by one of ordinary skill in the art, which depends in part on how the value is measured or determined, or a degree of variation that does not substantially affect the properties of the described subject matter, or within the tolerances accepted in the art, e.g., within 10%, 5%, 2%, or 1%. Accordingly, unless indicated to the contrary, the numerical parameters set forth in the following specification and attached claims are approximations that may vary depending upon the desired properties sought to be obtained. At the very least, and not as an attempt to limit the application of the doctrine of equivalents to the scope of the claims, each numerical parameter should at least be construed in light of the number of reported significant digits and by applying ordinary rounding techniques.

[0097] Unless specifically noted in the above specification, embodiments in the specification that recite “comprising” various components are also contemplated as “consisting of” or “consisting essentially of” the recited components; embodiments in the specification that recite “consisting of” various components are also contemplated as “comprising” or “consisting essentially of” the recited components; and embodiments in the specification that recite “consisting essentially of” various components are also contemplated as “consisting of” or “comprising” the recited components (this interchangeability does not apply to the use of these terms in the claims).

[0098] The section headings used herein are for organizational purposes only and are not to be construed as limiting the desired subject matter in any way. In the event that any literature incorporated by reference contradicts the express content of this specification, including but not limited to a definition, the express content of this specification controls. While the present teachings are described in conjunction with various embodiments, it is not intended that the present teachings be limited to such embodiments. On the contrary, the present teachings encompass various alternatives, modifications, and equivalents, as will be appreciated by those of skill in the art.

### I. Definitions

[0099] Unless stated otherwise, the following terms and phrases as used herein are intended to have the following meanings:

[0100] The term “or combinations thereof” as used herein refers to all permutations and combinations of the listed terms preceding the term. For example, “A, B, C, or combinations thereof” is intended to include at least one of: A, B, C, AB, AC, BC, or ABC, and if order is important in a particular context, also BA, CA, CB, ACB, CBA, BCA, BAC, or CAB. Continuing with this example, expressly included are combinations that contain repeats of one or more item or term, such as BB, AAA, AAB, BBC, CBBA, CABA, and so forth. The skilled artisan will understand that typically there is no limit on the number of items or terms in any combination, unless otherwise apparent from the context.

[0101] As used herein, the term “kit” refers to a packaged set of related components, such as one or more polynucleotides or compositions and one or more related materials such as delivery devices (e.g., syringes), solvents, solutions, buffers, instructions, or desiccants.

[0102] “Or” is used in the inclusive sense, i.e., equivalent to “and/or,” unless the context requires otherwise.

[0103] “Polynucleotide” and “nucleic acid” are used herein to refer to a multimeric compound comprising nucleosides or nucleoside analogs which have nitrogenous heterocyclic bases or base analogs linked together along a backbone, including conventional RNA, DNA, mixed RNA-DNA, and polymers that are analogs thereof. A nucleic acid “backbone” can be made up of a variety of linkages, including one or more of sugar-phosphodiester linkages, peptide-nucleic acid bonds (“peptide nucleic acids” or PNA; PCT No. WO 95/32305), phosphorothioate linkages, methylphosphonate linkages, or combinations thereof. Sugar moieties of a nucleic acid can be ribose, deoxyribose, or similar compounds with substitutions, e.g., 2′ methoxy or 2′ halide substitutions. Nitrogenous bases can be conventional bases (A, G, C, T, U), analogs thereof (e.g., modified uridines such as 5-methoxyuridine, pseudouridine, or N1-methylpseudouridine, or others); inosine; derivatives of purines or pyrimidines (e.g., N4-methyl deoxyguanosine, deaza- or aza-purines, deaza- or aza-pyrimidines, pyrimidine bases with substituent groups at the 5 or 6 position (e.g., 5-methylcytosine), purine bases with a substituent at the 2, 6, or 8 positions, 2-amino-6-methylaminopurine, O⁶-methylguanine, 4-thio-pyrimidines, 4-amino-pyrimidines, 4-dimethylhydrazine-pyrimidines, and O⁴-alkyl-pyrimidines; U.S. Pat. No. 5,378,825 and PCT No. WO 93/13121). For general discussion see The Biochemistry of the Nucleic Acids 5-36, Adams et al., ed., 11^{th} ed., 1992). Nucleic acids can include one or more “abasic” residues where the backbone includes no nitrogenous base for position(s) of the polymer (U.S. Pat. No. 5,585,481). A nucleic acid can comprise only conventional RNA or DNA sugars, bases and linkages, or can include both conventional components and substitutions (e.g., conventional bases with 2′ methoxy linkages, or polymers containing both conventional bases and one or more base analogs). Nucleic acid includes “locked nucleic acid” (LNA), an analogue containing one or more LNA nucleotide monomers with a bicyclic furanose unit locked in an RNA mimicking sugar conformation, which enhance hybridization affinity toward complementary RNA and DNA sequences (Vester and Wengel, 2004, Biochemistry 43(42):13233-41). RNA and DNA have different sugar moieties and can differ by the presence of uracil or analogs thereof in RNA and thymine or analogs thereof in DNA.

[0104] “Polypeptide” as used herein refers to a multimeric compound comprising amino acid residues that can adopt a three-dimensional conformation. Polypeptides include but are not limited to enzymes, enzyme precursor proteins, regulatory proteins, structural proteins, receptors, nucleic acid binding proteins, antibodies, etc. Polypeptides may, but do not necessarily, comprise post-translational modifications, non-natural amino acids, prosthetic groups, and the like.

[0105] As used herein, a “cytidine deaminase” means a polypeptide or complex of polypeptides that is capable of cytidine deaminase activity, that is catalyzing the hydrolytic deamination of cytidine or deoxycytidine, typically resulting in uridine or deoxyuridine. Cytidine deaminases encompass enzymes in the cytidine deaminase superfamily, and in particular, enzymes of the APOBEC family (APOBEC1, APOBEC2, APOBEC4, and APOBEC3 subgroups of enzymes), activation-induced cytidine deaminase (AID or AICDA) and CMP deaminases (see, e.g., Conticello et al., Mol. Biol. Evol. 22:367-77, 2005; Conticello, Genome Biol. 9:229, 2008; Muramatsu et al., J. Biol. Chem. 274: 18470-6, 1999); Carrington et al., Cells 9:1690 (2020)). In some embodiments, variants of any known cytidine deaminase or APOBEC protein are encompassed. Variants include proteins having a sequence that differs from wild-type protein by one or several mutations (i.e., substitutions, deletions, insertions), such as one or several single point substitutions. For instance, a shortened sequence could be used, e.g., by deleting N-terminal, C-terminal, or internal amino acids, preferably one to four amino acids at the C-terminus of the sequence. As used herein, the term “variant” refers to allelic variants, splicing variants, and natural or artificial mutants, which are homologous to a reference sequence. The variant is “functional” in that it shows a catalytic activity of DNA editing.

[0106] As used herein, the term “APOBEC3A” refers to a cytidine deaminase such as the protein expressed by the human A3A gene. The APOBEC3A may have catalytic DNA editing activity. An amino acid sequence of APOBEC3A has been described (UniPROT accession ID: p31941) and is included herein as SEQ ID NO: 40. In some embodiments, the APOBEC3A protein is a human APOBEC3A protein and/or a wild-type protein. Variants include proteins having a sequence that differs from wild-type APOBEC3A protein by one or several mutations (i.e., substitutions, deletions, insertions), such as one or several single point substitutions. For instance, a shortened APOBEC3A sequence could be used, e.g. by deleting N-terminal, C-terminal, or internal amino acids, preferably one to four amino acids at the C-terminus of the sequence. As used herein, the term “variant” refers to allelic variants, splicing variants, and natural or artificial mutants, which are homologous to an APOBEC3A reference sequence. The variant is “functional” in that it shows a catalytic activity of DNA editing. In some embodiments, an APOBEC3A (such as a human APOBEC3A) has a wild-type amino acid position 57 (as numbered in the wild-type sequence). In some embodiments, an APOBEC3A (such as a human APOBEC3A) has an asparagine at amino acid position 57 (as numbered in the wild-type sequence).

[0107] As used herein, a “nickase” is an enzyme that creates a single-strand break (also known as a “nick”) in double strand DNA, i.e., cuts one strand but not the other of the DNA double helix. As used herein, an “RNA-guided nickase” means a polypeptide or complex of polypeptides having DNA nickase activity, wherein the DNA nickase activity is sequence-specific and depends on the sequence of the RNA. Exemplary RNA-guided nickases include Cas nickases. Cas nickases include, but are not limited to, nickase forms of a Csm or Cmr complex of a type III CRISPR system, the Cas10, Csm1, or Cmr2 subunit thereof, a Cascade complex of a type I CRISPR system, the Cas3 subunit thereof, and Class 2 Cas nucleases. Class 2 Cas nickases include Class 2 Cas nuclease variants in which only one of the two catalytic domains is inactivated, which have RNA-guided DNA nickase activity. Class 2 Cas nickases include, for example, Cas9 (e.g., H840A, DOA, or N863A variants of SpyCas9), Cpf1, C2c1, C2c2, C2c3, HF Cas9 (e.g., N497A, R661A, Q695A, Q926A variants), HypaCas9 (e.g., N692A, M694A, Q695A, H698A variants), eSPCas9(1.0) (e.g., K810A, K1003A, R1060A variants), and eSPCas9(1.1) (e.g., K848A, K1003A, R1060A variants) proteins and modifications thereof. Cpf1 protein, Zetsche et al., Cell, 163: 1-13 (2015), is homologous to Cas9, and contains a RuvC-like protein domain. Cpf1 sequences of Zetsche are incorporated by reference in their entirety. See, e.g., Zetsche, Tables S1 and S3. “Cas9” encompasses S. pyogenes (Spy) Cas9, the variants of Cas9 listed herein, and equivalents thereof. See, e.g., Makarova et al., Nat Rev Microbiol, 13(11): 722-36 (2015); Shmakov et al., Molecular Cell. 60:385-397 (2015).

[0108] Several Cas9 orthologs have been obtained from N. meningitidis (Esvelt et al., NAT. METHODS, vol. 10, 2013, 1116-1121; Hou et al., PNAS, vol. 110, 2013, pages 15644-15649; Edraki et al., Mol. Cell 73:714-726, 2019) (Nme1Cas9, Nme2Cas9, and Nme3Cas9). The Nme2Cas9 ortholog functions efficiently in mammalian cells, recognizes an N4CC PAM, and can be used for in vivo editing (Ran et al., NATURE, vol. 520, 2015, pages 186-191; Kim et al., NAT. COMMUN., vol. 8, 2017, pages 14500). Nme2Cas9 has been shown to be naturally resistant to off-target editing (Lee et al., MOL. THER., vol. 24, 2016, pages 645-654; Kim et al., 2017). See also e.g., WO/2020081568 (e.g., pages 28 and 42), describing an Nme2Cas9 D16A nickase, the contents of which are hereby incorporated by reference in its entirety. Throughout, “NmeCas9” is generic and an encompasses any type of NmeCas9, including, Nme1Cas9, Nme2Cas9, and Nme3Cas9.

[0109] As used herein, the term “fusion protein” refers to a hybrid polypeptide which comprises polypeptides from at least two different proteins or sources. One polypeptide may be located at the amino-terminal (N-terminal) portion of the fusion protein or at the carboxy-terminal (C-terminal) protein thus forming an “amino-terminal fusion protein” or a “carboxy-terminal fusion protein,” respectively. Any of the proteins provided herein may be produced by any method known in the art. For example, the proteins provided herein may be produced via recombinant protein expression and purification, which is especially suited for fusion proteins comprising a peptide linker. Methods for recombinant protein expression and purification are well known, and include those described by Green and Sambrook, Molecular Cloning: A Laboratory Manual (4th ed., Cold Spring Harbor Laboratory Press, Cold Spring Harbor, N.Y. (2012)), the entire contents of which are incorporated herein by reference.

[0110] The term “linker,” as used herein, refers to a chemical group or a molecule linking two adjacent molecules or moieties. Typically, the linker is positioned between, or flanked by, two groups, molecules, or other moieties and connected to each one via a covalent bond. In some embodiments, the linker is an amino acid or a plurality of amino acids (e.g., a peptide or protein) such as a 16-amino acid residue “XTEN” linker, or a variant thereof (See, e.g., the Examples; and Schellenberger et al. A recombinant polypeptide extends the in vivo half-life of peptides and proteins in a tunable manner. Nat. Biotechnol. 27, 1186-1190 (2009)). In some embodiments, the XTEN linker comprises the sequence SGSETPGTSESATPES (SEQ ID NO: 46), SGSETPGTSESA (SEQ ID NO: 47), or SGSETPGTSESATPEGGSGGS (SEQ ID NO: 48). In some embodiments, the linker comprises one or more sequences selected from SEQ ID NOs: 46-59, 61 and 211-272.

[0111] As used herein, the term “uracil glycosylase inhibitor”, “uracil-DNA glycosylase inhibitor” or “UGI” refers to a protein that is capable of inhibiting a uracil-DNA glycosylase (UDG) base-excision repair enzyme (e.g., UniPROT ID: P14739; SEQ ID NO: 27; SEQ ID NO:43).

[0112] As used herein, “open reading frame” or “ORF” of a gene refers to a sequence consisting of a series of codons that specify the amino acid sequence of the protein that the gene codes for. The ORF generally begins with a start codon (e.g., ATG in DNA or AUG in RNA) and ends with a stop codon, e.g., TAA, TAG or TGA in DNA or UAA, UAG, or UGA in RNA.

[0113] “Guide RNA”, “gRNA”, and “guide” are used herein interchangeably to refer to either a crRNA (also known as CRISPR RNA), or the combination of a crRNA and a trRNA (also known as tracrRNA). The crRNA and trRNA may be associated as a single RNA molecule (single guide RNA, sgRNA) or in two separate RNA molecules (dual guide RNA, dgRNA). “Guide RNA” or “gRNA” refers to each type. The trRNA may be a naturally-occurring sequence, or a trRNA sequence with modifications or variations compared to naturally-occurring sequences.

[0114] As used herein, a “guide sequence” or “guide region” or “spacer” or “spacer sequence” and the like refers to a sequence within a gRNA that is complementary to a target sequence and functions to direct a gRNA to a target sequence for binding or modification (e.g., cleavage) by an RNA-guided nickase. A guide sequence can be 20 nucleotides in length, e.g., in the case of Streptococcus pyogenes (i.e., Spy Cas9 (also referred to as SpCas9)) and related Cas9 homologs/orthologs. Shorter or longer sequences can also be used as guides, e.g., 15-, 16-, 17-, 18-, 19-, 21-, 22-, 23-, 24-, or 25-nucleotides in length. A guide sequence can be 20-25 nucleotides in length, e.g., in the case of Nme Cas9, e.g., 20-, 21-, 22-, 23-, 24- or 25-nucleotides in length. For example, a guide sequence of 24 nucleotides in length can be used with Nme Cas9, e.g., Nme2 Cas9.

[0115] In some embodiments, the target sequence is in a gene or on a chromosome, for example, and is complementary to the guide sequence. In some embodiments, the degree of complementarity or identity between a guide sequence and its corresponding target sequence may be about 75%, 80%, 85%, 90%, 95%, or 100%. In some embodiments, the guide sequence and the target region may be 100% complementary or identical. In other embodiments, the guide sequence and the target region may contain at least one mismatch. For example, the guide sequence and the target sequence may contain 1, 2, 3, or 4 mismatches, where the total length of the target sequence is at least 17, 18, 19, 20 or more base pairs. In some embodiments, the guide sequence and the target region may contain 1-4 mismatches where the guide sequence comprises at least 17, 18, 19, 20 or more nucleotides. In some embodiments, the guide sequence and the target region may contain 1, 2, 3, or 4 mismatches where the guide sequence comprises 20 nucleotides.

[0116] As used herein, a “target sequence” or “genomic target sequence” refers to a sequence of nucleic acid in a target gene that has complementarity to the guide sequence of the gRNA. The interaction of the target sequence and the guide sequence directs an RNA-guided DNA binding agent to bind, and potentially nick or cleave (depending on the activity of the agent), within the target sequence. Target sequences for Cas proteins include both the positive and negative strands of genomic DNA (i.e., the sequence given and the sequence's reverse compliment), as a nucleic acid substrate for a Cas protein is a double stranded nucleic acid. Accordingly, where a guide sequence is said to be “complementary to a target sequence,” it is to be understood that the guide sequence may direct an RNA-guided DNA binding agent (e.g., dCas9 or impaired Cas9) to bind to the reverse complement of a target sequence. Thus, in some embodiments, where the guide sequence binds the reverse complement of a target sequence, the guide sequence is identical to certain nucleotides of the target sequence (e.g., the target sequence not including the PAM) except for the substitution of U for T in the guide sequence.

[0117] As used herein, a first sequence is considered to “comprise a sequence with at least X % identity to” a second sequence if an alignment of the first sequence to the second sequence shows that X % or more of the positions of the second sequence in its entirety are matched by the first sequence. For example, the sequence AAGA comprises a sequence with 100% identity to the sequence AAG because an alignment would give 100% identity in that there are matches to all three positions of the second sequence. The differences between RNA and DNA (generally the exchange of uridine for thymidine or vice versa) and the presence of nucleoside analogs such as modified uridines do not contribute to differences in identity or complementarity among polynucleotides as long as the relevant nucleotides (such as thymidine, uridine, or modified uridine) have the same complement (e.g., adenosine for all of thymidine, uridine, or modified uridine; another example is cytosine and 5-methylcytosine, both of which have guanosine as a complement). Thus, for example, the sequence 5′-AXG where X is any modified uridine, such as pseudouridine, N1-methyl pseudouridine, or 5-methoxyuridine, is considered 100% identical to AUG in that both are perfectly complementary to the same sequence (5′-CAU). Exemplary alignment algorithms are the Smith-Waterman and Needleman-Wunsch algorithms, which are well-known in the art. One skilled in the art will understand what choice of algorithm and parameter settings are appropriate for a given pair of sequences to be aligned; for sequences of generally similar length and expected identity >50% for amino acids or >75% for nucleotides, the Needleman-Wunsch algorithm with default settings of the Needleman-Wunsch algorithm interface provided by the EBI at the www.ebi.ac.uk web server are generally appropriate.

[0118] “mRNA” is used herein to refer to a polynucleotide that is not DNA and comprises an open reading frame that can be translated into a polypeptide (i.e., can serve as a substrate for translation by a ribosome and amino-acylated tRNAs). mRNA can comprise a phosphate-sugar backbone including ribose residues or analogs thereof, e.g., 2′-methoxy ribose residues. In some embodiments, the sugars of an mRNA phosphate-sugar backbone consist essentially of ribose residues, 2′-methoxy ribose residues, or a combination thereof. In general, mRNAs do not contain a substantial quantity of thymidine residues (e.g., 0 residues or fewer than 30, 20, 10, 5, 4, 3, or 2 thymidine residues; or less than 10%, 9%, 8%, 7%, 6%, 5%, 4%, 4%, 3%, 2%, 1%, 0.5%, 0.2%, or 0.1% thymidine content). An mRNA can contain modified uridines at some or all of its uridine positions.

[0119] “Modified uridine” is used herein to refer to a nucleoside other than thymidine with the same hydrogen bond acceptors as uridine and one or more structural differences from uridine. In some embodiments, a modified uridine is a substituted uridine, i.e., a uridine in which one or more non-proton substituents (e.g., alkoxy, such as methoxy) takes the place of a proton. In some embodiments, a modified uridine is pseudouridine. In some embodiments, a modified uridine is a substituted pseudouridine, i.e., a pseudouridine in which one or more non-proton substituents (e.g., alkyl, such as methyl) takes the place of a proton. In some embodiments, a modified uridine is any of a substituted uridine, pseudouridine, or a substituted pseudouridine.

[0120] “Uridine position” as used herein refers to a position in a polynucleotide occupied by a uridine or a modified uridine. Thus, for example, a polynucleotide in which “100% of the uridine positions are modified uridines” contains a modified uridine at every position that would be a uridine in a conventional RNA (where all bases are standard A, U, C, or G bases) of the same sequence. Unless otherwise indicated, a U in a polynucleotide sequence of a sequence table or sequence listing in or accompanying this disclosure can be a uridine or a modified uridine.

[0121] As used herein, the “minimal uridine codon(s)” for a given amino acid is the codon(s) with the fewest uridines (usually 0 or 1 except for a codon for phenylalanine, where the minimal uridine codon has 2 uridines). Modified uridine residues are considered equivalent to uridines for the purpose of evaluating uridine content.

[0122] As used herein, the “uridine dinucleotide (UU) content” of an ORF can be expressed in absolute terms as the enumeration of UU dinucleotides in an ORF or on a rate basis as the percentage of positions occupied by the uridines of uridine dinucleotides (for example, AUUAU would have a uridine dinucleotide content of 40% because 2 of 5 positions are occupied by the uridines of a uridine dinucleotide). Modified uridine residues are considered equivalent to uridines for the purpose of evaluating uridine dinucleotide content.

[0123] As used herein, the “minimal adenine codon(s)” for a given amino acid is the codon(s) with the fewest adenines (usually 0 or 1 except for a codon for lysine and asparagine, where the minimal adenine codon has 2 adenines). Modified adenine residues are considered equivalent to adenines for the purpose of evaluating adenine content.

[0124] As used herein, the “adenine dinucleotide content” of an ORF can be expressed in absolute terms as the enumeration of AA dinucleotides in an ORF or on a rate basis as the percentage of positions occupied by the adenines of adenine dinucleotides (for example, UAAUA would have an adenine dinucleotide content of 40% because 2 of 5 positions are occupied by the adenines of an adenine dinucleotide). Modified adenine residues are considered equivalent to adenines for the purpose of evaluating adenine dinucleotide content.

[0125] As used herein, “indels” refer to insertion/deletion mutations consisting of a number of nucleotides that are either inserted or deleted, e.g., at the site of double-stranded breaks (DSBs) in a target nucleic acid.

[0126] As used herein, “knockdown” refers to a decrease in expression of a particular gene product (e.g., protein, mRNA, or both). Knockdown of a protein can be measured either by detecting protein secreted by tissue or population of cells (e.g., in serum or cell media) or by detecting total cellular amount of the protein from a tissue or cell population of interest. Methods for measuring knockdown of mRNA are known and include sequencing of mRNA isolated from a tissue or cell population of interest. In some embodiments, “knockdown” may refer to some loss of expression of a particular gene product, for example a decrease in the amount of mRNA transcribed or a decrease in the amount of protein expressed or secreted by a population of cells (including in vivo populations such as those found in tissues).

[0127] As used herein, “knockout” refers to a loss of expression of a particular protein in a cell. Knockout can be measured either by detecting the amount of protein secretion from a tissue or population of cells (e.g., in serum or cell media) or by detecting total cellular amount of a protein a tissue or a population of cells. In some embodiments, the methods of the disclosure “knockout” a target protein one or more cells (e.g., in a population of cells including in vivo populations such as those found in tissues). In some embodiments, a knockout is not the formation of mutant of the target protein, for example, created by indels, but rather the complete loss of expression of the target protein in a cell, i.e., decrease of expression to below the level of detection of the assay used.

[0128] As used herein, the terms “nuclear localization signal” (NLS) or “nuclear localization sequence” refers to an amino acid sequence which induces transport of molecules comprising such sequences or linked to such sequences into the nucleus of eukaryotic cells. The nuclear localization signal may form part of the molecule to be transported. In some embodiments, the NLS may be fused to the molecule by a covalent bond, hydrogen bonds or ionic interactions. In some embodiments, the NLS may be fused to the molecule via a linker.

[0129] “β2M” or “B2M,” as used herein, refers to nucleic acid sequence or protein sequence of “β-2 microglobulin;” the human gene has accession number NC_000015 (range 44711492 . . . 44718877), reference GRCh38.p13. The B2M protein is associated with MHC class I molecules as a heterodimer on the surface of nucleated cells and is required for MHC class I protein expression.

[0130] “CIITA” or “CIITA” or “C2TA,” as used herein, refers to the nucleic acid sequence or protein sequence of “class II major histocompatibility complex transactivator;” the human gene has accession number NC_000016.10 (range 10866208 . . . 10941562), reference GRCh38.p13. The CIITA protein in the nucleus acts as a positive regulator of MHC class II gene transcription and is required for MHC class II protein expression.

[0131] As used herein, “MHC” or “MHC molecule(s)” or “MHC protein” or “MHC complex(es),” refers to a major histocompatibility complex molecule (or plural), and includes, e.g., MHC class I and MHC class II molecules. In humans, MHC molecules are referred to as “human leukocyte antigen” complexes or “HLA molecules” or “HLA protein.” The use of terms “MHC” and “HLA” are not meant to be limiting; as used herein, the term “MHC” may be used to refer to human MHC molecules, i.e., HLA molecules. Therefore, the terms “MHC” and “HLA” are used interchangeably herein.

[0132] The term “HLA-A,” as used herein in the context of HLA-A protein, refers to the MHC class I protein molecule, which is a heterodimer consisting of a heavy chain (encoded by the HLA-A gene) and a light chain (i.e., beta-2 microglobulin). The term “HLA-A” or “HLA-A gene,” as used herein in the context of nucleic acids refers to the gene encoding the heavy chain of the HLA-A protein molecule. The HLA-A gene is also referred to as “HLA class I histocompatibility, A alpha chain;” the human gene has accession number NC_000006.12 (29942532 . . . 29945870). The HLA-A gene is known to have thousands of different versions (also referred to as “alleles”) across the population (and an individual may receive two different alleles of the HLA-A gene). A public database for HLA-A alleles, including sequence information, may be accessed at IPD-IMGT/HLA: https://www.ebi.ac.uk/ipd/imgt/hla/. All alleles of HLA-A are encompassed by the terms “HLA-A” and “HLA-A gene.”

[0133] “HLA-B” as used herein in the context of nucleic acids refers to the gene encoding the heavy chain of the HLA-B protein molecule. The HLA-B is also referred to as “HLA class I histocompatibility, B alpha chain;” the human gene has accession number NC_000006.12 (31353875 . . . 31357179).

[0134] “HLA-C” as used herein in the context of nucleic acids refers to the gene encoding the heavy chain of the HLA-C protein molecule. The HLA-C is also referred to as “HLA class I histocompatibility, C alpha chain;” the human gene has accession number NC_000006.12 (31268749 . . . 31272092).

[0135] “TRBC1” and “TRBC2” as used herein in the context of nucleic acids refer to two homologous genes encoding the T-cell receptor β-chain. “TRBC” or “TRBC1/2” is used herein to refer to TRBC1 and TRBC2. The human wild-type TRBC1 sequence is available at NCBI Gene ID: 28639; Ensembl: ENSG0000021 1751. T-cell receptor Beta Constant, V_segment Translation Product, BV05SIJ2.2, TCRBC1, and TCRB are gene synonyms for TRBC1. The human wild-type TRBC2 sequence is available at NCBI Gene ID: 28638; Ensembl: ENSG00000211772. T-cell receptor Beta Constant, V_segment Translation Product, and TCRBC2 are gene synonyms for TRBC2.

[0136] “TRAC” as used herein in the context of nucleic acids refers to the gene encoding the T-cell receptor α-chain. The human wild-type TRAC sequence is available at NCBI Gene ID: 28755; Ensembl: ENSG00000277734. T-cell receptor Alpha Constant, TCRA, IMD7, TRCA and TRA are gene synonyms for TRAC.

[0137] As used herein, the term “homozygous” refers to having two identical alleles of a particular gene.

[0138] As used herein, “treatment” refers to any administration or application of a therapeutic for disease or disorder in a subject, and includes inhibiting the disease, arresting its development, relieving one or more symptoms of the disease, curing the disease, or preventing one or more symptoms of the disease, including reoccurrence of the symptom.

[0139] As used herein, “delivering” and “administering” are used interchangeably, and include ex vivo and in vivo applications.

[0140] Co-administration, as used herein, means that a plurality of substances are administered sufficiently close together in time so that the agents act together. Co-administration encompasses administering substances together in a single formulation and administering substances in separate formulations close enough in time so that the agents act together.

[0141] As used herein, the phrase “pharmaceutically acceptable” means that which is useful in preparing a pharmaceutical composition that is generally non-toxic and is not biologically undesirable and that are not otherwise unacceptable for pharmaceutical use. Pharmaceutically acceptable generally refers to substances that are non-pyrogenic. Pharmaceutically acceptable can refer to substances that are sterile, especially for pharmaceutical substances that are for injection or infusion.

[0142] As used herein, a “subject” refers to any member of the animal kingdom. In some embodiments, “subject” refers to humans. In some embodiments, “subject” refers to non-human animals. In some embodiments, “subject” refers to primates. In some embodiments, subjects include, but are not limited to, mammals, birds, reptiles, amphibians, fish, insects, and/or worms. In certain embodiments, the non-human subject is a mammal (e.g., a rodent, a mouse, a rat, a rabbit, a monkey, a dog, a cat, a sheep, cattle, a primate, and/or a pig). In some embodiments, a subject may be a transgenic animal, genetically-engineered animal, and/or a clone. In certain embodiments of the present invention the subject is an adult, an adolescent or an infant. In some embodiments, terms “individual” or “patient” are used and are intended to be interchangeable with “subject”.

[0143] As used herein, “reduced or eliminated” expression of a protein on a cell refers to a partial or complete loss of expression of the protein relative to an unmodified cell. In some embodiments, the surface expression of a protein on a cell is measured by flow cytometry and has “reduced or eliminated” surface expression relative to an unmodified cell as evidenced by a reduction in fluorescence signal upon staining with the same antibody against the protein. A cell that has “reduced or eliminated” surface expression of a protein by flow cytometry relative to an unmodified cell may be referred to as “negative” for expression of that protein as evidenced by a fluorescence signal similar to a cell stained with an isotype control antibody. The “reduction or elimination” of protein expression can be measured by other known techniques in the field with appropriate controls known to those skilled in the art.

### II. Exemplary Compositions and Methods

[0144] In some embodiments, a nucleic acid is provided, the nucleic acid comprising an open reading frame encoding a polypeptide comprising a cytidine deaminase (e.g., A3A) and an RNA-guided nickase, wherein the polypeptide does not comprise a uracil glycosylase inhibitor (UGI). In some embodiments, the nucleic acid is DNA or RNA. In some embodiments, the nucleic acid is mRNA. In some embodiments, a polypeptide encoded by the mRNA is provided.

[0145] In some embodiments, a polypeptide or an mRNA encoding the polypeptide, are provided, the polypeptide comprising a cytidine deaminase and an RNA-guided nickase, wherein the polypeptide does not comprise a UGI. In some embodiments, the cytidine deaminase is A3A. In some embodiments, the RNA-guided nickase does not comprise a uracil glycosylase inhibitor (UGI). In some embodiments, a composition is provided comprising a first polypeptide, or an mRNA encoding a first polypeptide, comprising a cytidine deaminase (e.g., A3A) and an RNA-guided nickase; and a second polypeptide, or an mRNA encoding a second polypeptide, comprising a uracil glycosylase inhibitor (UGI), wherein the second polypeptide is different from the first polypeptide.

[0146] In some embodiments, a composition is provided comprising a first nucleic acid comprising a first open reading frame encoding a polypeptide comprising a cytidine deaminase (e.g., A3A) and an RNA-guided nickase, and a second nucleic acid comprising a second open reading frame encoding a uracil glycosylase inhibitor (UGI), wherein the second nucleic acid is different from the first nucleic acid. In some embodiments, the first nucleic acid encodes a polypeptide that does not comprise a UGI.

[0147] In some embodiments, methods of modifying a target gene are provided comprising administering the compositions described herein. In some embodiments, the method comprises delivering to a cell a first nucleic acid comprising a first open reading frame encoding a first polypeptide comprising a cytidine deaminase (e.g., A3A) and an RNA-guided nickase, and a second nucleic acid comprising a second open reading frame encoding a uracil glycosylase inhibitor (UGI), wherein the second nucleic acid is different from the first nucleic acid.

[0148] In some embodiments, the methods comprise delivering to a cell a polypeptide comprising a cytidine deaminase (e.g., A3A) and an RNA-guided nickase, or a nucleic acid encoding the polypeptide, and separately (e.g., not via the same nucleic acid construct) delivering to the cell a uracil glycosylase inhibitor (UGI), or a nucleic acid encoding the UGI.

[0149] In some embodiments, a molar ratio of the mRNA encoding UGI to the mRNA encoding the cytidine deaminase (e.g., A3A) and the RNA-guided nickase is from about 1:35 to from about 30:1. In some embodiments, the molar ratio is from about 1:25 to about 25:1. In some embodiments, the molar ratio is from about 1:20 to about 25:1. In some embodiments, the molar ratio is from about 1:10 to about 22:1. In some embodiments, the molar ratio is from about 1:5 to about 25:1. In some embodiments, the molar ratio is from about 1:1 to about 30:1. In some embodiments, the molar ratio is from about 2:1 to about 10:1. In some embodiments, the molar ratio is from about 5:1 to about 20:1. In some embodiments, the molar ratio is from about 1:1 to about 25:1. In some embodiments, the molar ratio may be about 1:35, 1:34, 1:33, 1:32, 1:31, 1:30, 1:32, 1:31, 1:30, 1:29, 1:28, 1:27, 1:26, 1:25, 1:24, 1:23, 1:22, 1:21, 1:20, 1:19, 1:18, 1:17, 1:16, 1:15, 1:14, 1:13, 1:12, 1:11, 1:10, 1:9, 1:8, 1:7, 1:6, 1:5, 1:4, 1:3, 1:2, 1:1, 2:1, 3:1, 4:1, 5:1, 6:1, 7:1, 8:1, 9:1, 10:1, 11:1, 12:1, 13:1, 14:1, 15:1, 16:1, 17:1, 18:1, 19:1, 20:1, 21:1, 22:1, 23:1, 24:1, 25:1, 26:1, 27:1, 28:1, 29:1, or 30:1. In some embodiments, the molar ratio is equal to or larger than about 1:1. In some embodiments the molar ratio is about 1:1. In some embodiments the molar ratio is about 2:1. In some embodiments the molar ratio is about 3:1. In some embodiments the molar ratio is about 4:1. In some embodiments the molar ratio is about 5:1. In some embodiments the molar ratio is about 6:1. In some embodiments the molar ratio is about 7:1. In some embodiments the molar ratio is about 8:1. In some embodiments the molar ratio is about 9:1. In some embodiments the molar ratio is about 10:1. In some embodiments the molar ratio is about 11:1. In some embodiments the molar ratio is about 12:1. In some embodiments the molar ratio is about 13:1. In some embodiments the molar ratio is about 14:1. In some embodiments the molar ratio is about 15:1. In some embodiments the molar ratio is about 16:1. In some embodiments the molar ratio is about 17:1. In some embodiments the molar ratio is about 18:1. In some embodiments the molar ratio is about 19:1. In some embodiments the molar ratio is about 20:1. In some embodiments the molar ratio is about 21:1. In some embodiments the molar ratio is about 22:1. In some embodiments the molar ratio is about 23:1. In some embodiments the molar ratio is about 24:1. In some embodiments the molar ratio is about 25:1.

[0150] Similarly, in some embodiments, the molar ratio discussed above for the mRNA encoding the UGI protein to the mRNA encoding the cytidine deaminase (e.g., A3A) and the RNA-guided nickase are similar if delivering protein.

[0151] For example, in some embodiments, a molar ratio of the UGI protein to be delivered to the cytidine deaminase (e.g., A3A) and the RNA-guided nickase to be delivered is from about 1:35 to from about 30:1. In some embodiments, the molar ratio is from about 1:1 to about 30:1.

[0152] In some embodiments, the molar ratio of the UGI peptide and the cytidine deaminase (e.g., A3A) and the RNA-guided nickase is from about 10:1 to about 50:1. In some embodiments, the molar ratio may be about 10:1, 11:1, 12:1, 13:1, 14:1, 15:1, 16:1, 17:1, 18:1, 19:1, 20:1, 21:1, 22:1, 23:1, 24:1, 25:1, 26:1, 27:1, 28:1, 29:1, 30:1, 31:1, 32:1, 33:1, 34:1, 35:1, 36:1, 37:1, 38:1, 39:1, 40:1, 41:1, 42:1, 43:1, 44:1, 45:1, 46:1, 47:1, 48:1, 49:1, or 50:1. In some embodiments, the molar ratio is from about 10:1-about 40:1. In some embodiments the molar ratio is from about 10:1-about 30:1. In some embodiments the molar ratio is about 2:1. In some embodiments the molar ratio is from about 10:1-about 20:1. In some embodiments the molar ratio is from about 10:1-about 15:1. In some embodiments the molar ratio is about 15:1-about 50:1. In some embodiments the molar ratio is about 6:1. In some embodiments the molar ratio is about 20:1-about 50:1. In some embodiments the molar ratio is about 8:1. In some embodiments the molar ratio is about 30:1-about 50:1. In some embodiments the molar ratio is about 30:1-about 40:1. In some embodiments the molar ratio is about 11:1. In some embodiments the molar ratio is about 20:1-about 30:1.

[0153] In some embodiments, the composition described herein further comprises at least one gRNA. In some embodiments, a composition is provided that comprises an mRNA described herein and at least one gRNA. In some embodiments, the gRNA is a single guide RNA (sgRNA). In some embodiments, the gRNA is a dual guide RNA (dgRNA).

[0154] In some embodiments, the composition is capable of effecting genome editing upon administration to the subject.

[0155] A. UGI

[0156] Without being bound by any theory, providing a UGI together with a polypeptide comprising a deaminase may be helpful in the methods described herein by inhibiting cellular DNA repair machinery (e.g., UDG and downstream repair effectors) that recognize a uracil in DNA as a form of DNA damage or otherwise would excise or modify the uracil and/or surrounding nucleotides. It should be understood that the use of a UGI may increase the editing efficiency of an enzyme that is capable of deaminating C residues.

[0157] Suitable UGI protein and nucleotide sequences are provided herein and additional suitable UGI sequences are known to those in the art, and include, for example, those published in Wang et al., Uracil-DNA glycosylase inhibitor gene of bacteriophage PBS2 encodes a binding protein specific for uracil-DNA glycosylase. J. Biol. Chem. 264: 1163-1171(1989); Lundquist et al., Site-directed mutagenesis and characterization of uracil-DNA glycosylase inhibitor protein. Role of specific carboxylic amino acids in complex formation with Escherichia coli uracil-DNA glycosylase. J. Biol. Chem. 272:21408-21419(1997); Ravishankar et al., X-ray analysis of a complex of Escherichia coli uracil DNA glycosylase (EcUDG) with a proteinaceous inhibitor. The structure elucidation of a prokaryotic UDG. Nucleic Acids Res. 26:4880-4887(1998); and Putnam et al., Protein mimicry of DNA from crystal structures of the uracil-DNA glycosylase inhibitor protein and its complex with Escherichia coli uracil-DNA glycosylase. J. Mol. Biol. 287:331-346(1999), the entire contents of each are incorporated herein by reference. It should be appreciated that any proteins that are capable of inhibiting a uracil-DNA glycosylase base-excision repair enzyme are within the scope of the present disclosure. Additionally, any proteins that block or inhibit base-excision repair are also within the scope of this disclosure. In some embodiments, a uracil glycosylase inhibitor is a protein that binds uracil. In some embodiments, a uracil glycosylase inhibitor is a protein that binds uracil in DNA. In some embodiments, a uracil glycosylase inhibitor is a single-stranded binding protein. In some embodiments, a uracil glycosylase inhibitor is a catalytically inactive uracil DNA-glycosylase protein. In some embodiments, a uracil glycosylase inhibitor is a catalytically inactive uracil DNA-glycosylase protein that does not excise uracil from the DNA. In some embodiments, a uracil glycosylase inhibitor is a catalytically inactive UDG.

[0158] In some embodiments, a uracil glycosylase inhibitor (UGI) disclosed herein comprises an amino acid sequence with at least 80% to SEQ ID NO: 27 or 43. In some embodiments, any of the foregoing levels of identity is at least 90%, at least 95%, at least 98%, at least 99%, or 100%. In some embodiments, the UGI comprises an amino acid sequence with at least 90% identity to SEQ ID NO: 27 or 43. In some embodiments, the UGI comprises an amino acid sequence with at least 95% identity to SEQ ID NO: 27 or 43. In some embodiments, the UGI comprises an amino acid sequence with at least 98% identity to SEQ ID NO: 27 or 43. In some embodiments, the UGI comprises an amino acid sequence with at least 99% identity to SEQ ID NO: 27 or 43. In some embodiments, the UGI comprises the amino acid sequence of SEQ ID NO: 27 or 43.

[0159] B. Cytidine Deaminase

[0160] Cytidine deaminases encompass enzymes in the cytidine deaminase superfamily, and in particular, enzymes of the APOBEC family (APOBEC1, APOBEC2, APOBEC4, and APOBEC3 subgroups of enzymes), activation-induced cytidine deaminase (AID or AICDA) and CMP deaminases (see, e.g., Conticello et al., Mol. Biol. Evol. 22:367-77, 2005; Conticello, Genome Biol. 9:229, 2008; Muramatsu et al., J. Biol. Chem. 274: 18470-6, 1999); and Carrington et al., Cells 9:1690 (2020)).

[0161] In some embodiments, the cytidine deaminase disclosed herein is an enzyme of APOBEC family. In some embodiments, the cytidine deaminase disclosed herein is an enzyme of APOBEC1, APOBEC2, APOBEC4, and APOBEC3 subgroups. In some embodiments, the cytidine deaminase disclosed herein is an enzyme of APOBEC3 subgroup. In some embodiments, the cytidine deaminase disclosed herein is an APOBEC3A deaminase (A3A).

[0162] In some embodiments, the cytidine deaminase is:
[0163] (i) an enzyme of the APOBEC family, optionally an enzyme of APOBEC3 subgroup;
[0164] (ii) a cytidine deaminase comprising an amino acid sequence that is at least 80% identical to any one of SEQ ID NOs: 40, 41, and 960-1023;
[0165] (iii) a cytidine deaminase comprising an amino acid sequence that is at least 80% identical to any one of SEQ ID NOs: 40, 41, and 960-1013;
[0166] (iv) a cytidine deaminase comprising an amino acid sequence that is at least 80% identical to any one of SEQ ID NOs: 40, 41, 976, 977, 979, 980, 984-987, 993-1006, and 1009; or
[0167] (v) a cytidine deaminase comprising an amino acid sequence that is at least 80% identical to any one of SEQ ID NOs: 40, 976, 981, 984, 986, and 1014-1023.

[0168] In some embodiments, the cytidine deaminase is a cytidine deaminase comprising an amino acid sequence having at least 80%, 85% 87%, 90%, 95%, 98%, 99%, or 100% identity to SEQ ID NO: 40, 41, and 960-1023. In some embodiments, the cytidine deaminase is a cytidine deaminase comprising an amino acid sequence that is at least 80%, 85%, 87%, 90%, 95%, 98%, 99%, or 100% identical to any one of SEQ ID NOs: 40, 41, and 960-1013. In some embodiments, the cytidine deaminase is a cytidine deaminase comprising an amino acid sequence that is at least 80%, 85%, 87%, 90%, 95%, 98%, 99%, or 100% identical to any one of SEQ ID NOs: 40, 41, 976, 977, 979, 980, 984-987, 993-1006, and 1009. In some embodiments, the cytidine deaminase is a cytidine deaminase comprising an amino acid sequence that is at least 80%, 85%, 87%, 90%, 95%, 98%, 99%, or 100% identical to any one of SEQ ID NOs: 40, 976, 981, 984, 986, and 1014-1023. In some embodiments, the cytidine deaminase is a cytidine deaminase comprising an amino acid sequence that is at least 80%, 85%, 87%, 90%, 95%, 98%, 99%, or 100% identical to SEQ ID NO: 976, 977, 993-1006, and 1009.

[0169] 1. APOBEC3A Deaminase

[0170] In some embodiments, an APOBEC3A deaminase (A3A) disclosed herein is a human A3A. In some embodiments, the A3A is a wild-type A3A.

[0171] In some embodiment, the A3A is an A3A variant. A3A variants share homology to wild-type A3A, or a fragment thereof. In some embodiments, a A3A variant has at least about 80% identity, at least about 85% identity, at least about 90% identity, at least about 95% identity, at least about 96% identity, at least about 97% identity, at least about 98% identity, at least about 99% identity, at least about 99.5% identity, or at least about 99.9% identity to a wild type A3A. In some embodiments, the A3A variant may have 1, 2, 3, 4, 5, 6, 7, 8, 9, 10, 11, 12, 13, 14, 15, 16, 17, 18, 19, 20, 21, 22, 21, 24, 25, 26, 27, 28, 29, 30, 31, 32, 33, 34, 35, 36, 37, 38, 39, 40, 41, 42, 43, 44, 45, 46, 47, 48, 49, 50 or more amino acid changes compared to a wild type A3A. In some embodiments, the A3A variant comprises a fragment of an A3A, such that the fragment has at least about 80% identity, at least about 90% identity, at least about 95% identity, at least about 96% identity, at least about 97% identity, at least about 98% identity, at least about 99% identity, at least about 99.5% identity, or at least about 99.9% identity to the corresponding fragment of a wild-type A3A.

[0172] In some embodiments, an A3A variant is a protein having a sequence that differs from a wild-type A3A protein by one or several mutations, such as substitutions, deletions, insertions, one or several single point substitutions. In some embodiments, a shortened A3A sequence could be used, e.g., by deleting N-terminal, C-terminal, or internal amino acids. In some embodiments, a shortened A3A sequence is used where one to four amino acids at the C-terminus of the sequence is deleted. In some embodiments, an APOBEC3A (such as a human APOBEC3A) has a wild-type amino acid position 57 (as numbered in the wild-type sequence). In some embodiments, an APOBEC3A (such as a human APOBEC3A) has an asparagine at amino acid position 57 (as numbered in the wild-type sequence).

[0173] In some embodiments, the wild-type A3A is a human A3A (UniPROT accession ID: p319411, SEQ ID NO: 40).

[0174] In some embodiments, the A3A disclosed herein comprises an amino acid sequence having at least 80% identity to SEQ ID NO: 40. In some embodiments, the level of identity is at least 85%, at least 87%, at least 90%, at least 95%, at least 98%, at least 99%, or 100%. In some embodiments, the A3A comprises an amino acid sequence having at least 87% identity to SEQ ID NO: 40. In some embodiments, the A3A comprises an amino acid sequence with at least 90% identity to SEQ ID NO: 40. In some embodiments, the A3A comprises an amino acid sequence with at least 95% identity to SEQ ID NO: 40. In some embodiments, the A3A comprises an amino acid sequence with at least 98% identity to SEQ ID NO: 40. In some embodiments, the A3A comprises an amino acid sequence with at least 99% identity to A3A ID NO: 40. In some embodiments, the A3A comprises the amino acid sequence of SEQ ID NO: 40.

[0175] C. Linkers

[0176] In some embodiments, the polypeptide comprising the A3A and the RNA-guided nickase described herein further comprises a linker that connects the A3A and the RNA-guided nickase. In some embodiments, the linker is an organic molecule, polymer, or chemical moiety. In some embodiments, the linker is a peptide linker. In some embodiments, the nucleic acid encoding the polypeptide comprising the A3A and the RNA-guided nickase further comprises a sequence encoding the peptide linker. mRNAs encoding the A3A-linker-RNA-guided nickase fusion protein are provided.

[0177] In some embodiments, the peptide linker is any stretch of amino acids having at least 1, at least 2, at least 3, at least 4, at least 5, at least 6, at least 7, at least 8, at least 9, at least 10, at least 15, at least 20, at least 25, at least 30, at least 40, at least 50, or more amino acids.

[0178] In some embodiments, the peptide linker is the 16 residue “XTEN” linker, or a variant thereof (See, e.g., the Examples; and Schellenberger et al. A recombinant polypeptide extends the in vivo half-life of peptides and proteins in a tunable manner. Nat. Biotechnol. 27, 1186-1190 (2009)). In some embodiments, the XTEN linker comprises a sequence that is any one of SGSETPGTSESATPES (SEQ ID NO: 46), SGSETPGTSESA (SEQ ID NO: 47), or SGSETPGTSESATPEGGSGGS (SEQ ID NO: 48). In some embodiments, the XTEN linker consists of the sequence SGSETPGTSESATPES (SEQ ID NO: 46), SGSETPGTSESA (SEQ ID NO: 47), or SGSETPGTSESATPEGGSGGS (SEQ ID NO: 48).

[0179] In some embodiments, the peptide linker comprises a (GGGGS)ₙ (e.g., SEQ ID NOs: 212, 216, 221, 240), a (G)ₙ, an (EAAAK)ₙ (e.g., SEQ ID NOs: 213, 219, 267), a (GGS)ₙ, an SGSETPGTSESATPES (SEQ ID NO: 46) motif (see. e.g., Guilinger J P, Thompson D B, Liu D R. Fusion of catalytically inactive Cas9 to FokI nuclease improves the specificity of genome modification. Nat. Biotechnol. 2014; 32(6): 577-82; the entire contents are incorporated herein by reference), or an (XP)ₙ motif, or a combination of any of these, wherein n is independently an integer between 1 and 30. See, WO2015089406, e.g., paragraph [0012], the entire content of which is incorporated herein by reference.

[0180] In some embodiments, the peptide linker comprises one or more sequences selected from SEQ ID NOs: 46-59, 61 and 211-272. In some embodiments, the peptide linker comprises one or more sequences selected from SEQ ID NO: 46, SEQ ID NO: 47, SEQ ID NO: 48, SEQ ID NO: 268, SEQ ID NO: 269, SEQ ID NO: 270. SEQ ID NO: 271 and SEQ ID NO: 272. In some embodiments, the peptide linker comprises a sequence of SEQ ID NO: 268.

[0181] D. RNA-Guided Nickase

[0182] In some embodiments, an RNA-guided nickase disclosed herein is a Cas nickase. In some embodiments, a RNA-guided nickase is from a specific Cas nuclease with its catalytic domain(s) being inactivated. In some embodiments, the RNA-guided nickase is a Class 2 Cas nickase, such as a Cas9 nickase or a Cpf1 nickase. In some embodiments, the RNA-guided nickase is an S. pyogenes Cas9 nickase. In some embodiments, the RNA-guided nickase is Neisseria meningitidis Cas9 nickase.

[0183] In some embodiments, the RNA-guided nickase is a modified Class 2 Cas protein or derived from a Class 2 Cas protein. In some embodiments, the RNA-guided nickase is modified or derived from a Cas protein, such as a Class 2 Cas nuclease (which may be, e.g., a Cas nuclease of Type II, V, or VI). Class 2 Cas nuclease include, for example, Cas9, Cpf1, C2c1, C2c2, and C2c3 proteins and modifications thereof. Examples of Cas9 nucleases include those of the type II CRISPR systems of S. pyogenes. S. aureus, and other prokaryotes (see. e.g., the list in the next paragraph), and modified (e.g., engineered or mutant) versions thereof. See, e.g., US2016/0312198 A1; US 2016/0312199 A1, which is incorporated by reference in its entirety. Other examples of Cas nucleases include a Csm or Cmr complex of a type III CRISPR system or the Cas10, Csm1, or Cmr2 subunit thereof; and a Cascade complex of a type I CRISPR system, or the Cas3 subunit thereof. In some embodiments, the Cas nuclease may be from a Type-IIA, Type-IIB, or Type-IIC system. For discussion of various CRISPR systems and Cas nucleases, see, e.g., Makarova et al., NAT. REV. MICROBIOL. 9:467-477 (2011); Makarova et al., NAT. REV. MICROBIOL, 13: 722-36 (2015); Shmakov et al., MOLECULAR CELL, 60:385-397 (2015).

[0184] A Cas nickase described herein may be a nickase form of a Cas nuclease from the species including, but not limited to, Streptococcus pyogenes, Streptococcus thermophilus, Streptococcus sp., Staphylococcus aureus, Listeria innocua, Lactobacillus gasseri, Francisella novicida, Wolinella succinogenes, Sutterella wadsworthensis, Gammaproteobacterium, Neisseria meningitidis, Campylobacter jejuni, Pasteurella multocida, Fibrobacter succinogene, Rhodospirillum rubrum, Nocardiopsis dassonvillei, Streptomyces pristinaespiralis, Streptomyces viridochromogenes, Streptomyces viridochromogenes, Streptosporangium roseum, Streptosporangium roseum, Alicyclobacillus acidocaldarius, Bacillus pseudomycoides, Bacillus selenitireducens, Exiguobacterium sibiricum, Lactobacillus delbrueckii, Lactobacillus salivarius, Lactobacillus buchneri, Treponema denticola, Microscilla marina, Burkholderiales bacterium, Polaromonas naphthalenivorans, Polaromonas sp., Crocosphaera watsonii, Cyanothece sp., Microcystis aeruginosa, Synechococcus sp., Acetohalobium arabaticum, Ammonifex degensii, Caldicelulosiruptor becscii, Candidatus Desulforudis, Clostridium botulinum, Clostridium difficile, Finegoldia magna, Natranaerobius thermophilus, Pelotomaculum thermopropionicum, Acidithiobacillus caldus, Acidithiobacillus ferrooxidans, Allochromatium vinosum, Marinobacter sp., Nitrosococcus halophilus, Nitrosococcus watsoni, Pseudoalteromonas haloplanktis, Ktedonobacter racemifer, Methanohalobium evestigatum, Anabaena variabilis, Nodularia spumigena, Nostoc sp., Arthrospira maxima, Arthrospira platensis, Arthrospira sp., Lyngbya sp., Microcoleus chthonoplastes, Oscillatoria sp., Petrotoga mobilis, Thermosipho africanus, Streptococcus pasteurianus, Neisseria cinerea, Campylobacter lari, Parvibaculum lavamentivorans, Corynebacterium diphtheria, Acidaminococcus sp., Lachnospiraceae bacterium ND2006, or Acaryochloris marina.

[0185] In some embodiments, the Cas nickase is a nickase form of the Cas9 nuclease from Streptococcus pyogenes. In some embodiments, the Cas nickase is a nickase form of the Cas9 nuclease from Streptococcus thermophilus. In some embodiments, the Cas nickase is a nickase form of the Cas9 nuclease from Neisseria meningitidis. See e.g., WO/2020081568, describing an Nme2Cas9 D16A nickase. In some embodiments, the Cas nickase is a nickase form of the Cas9 nuclease from Staphylococcus aureus. In some embodiments, the Cas nickase is a nickase form of the Cpf1 nuclease from Francisella novicida. In some embodiments, the Cas nickase is a nickase form of the Cpf1 nuclease from Acidaminococcus sp. In some embodiments, the Cas nickase is a nickase form of the Cpf1 nuclease from Lachnospiraceae bacterium ND2006. In further embodiments, the Cas nickase is a nickase form of the Cpf1 nuclease from Francisella tularensis, Lachnospiraceae bacterium, Butyrivibrio proteoclasticus, Peregrinibacteria bacterium, Parcubacteria bacterium, Smithella, Acidaminococcus, Candidatus Methanoplasma termitum, Eubacterium eligens, Moraxella bovoculi, Leptospira inadai, Porphyromonas crevioricanis, Prevotella disiens, or Porphyromonas macacae. In certain embodiments, the Cas nickase is a nickase form of a Cpf1 nuclease from an Acidaminococcus or Lachnospiraceae. As discussed elsewhere, a nickase may be derived from (i.e. related to) a specific Cas nuclease in that the nickase is a form of the nuclease in which one of its two catalytic domains is inactivated, e.g., by mutating an active site residue essential for nucleolysis, such as D10, H840, or N863 in Spy Cas9. One skilled in the art will be familiar with techniques for easily identifying corresponding residues in other Cas proteins, such as sequence alignment and structural alignment, which is discussed in detail below.

[0186] In other embodiments, the Cas nickase may relate to a Type-I CRISPR/Cas system. In some embodiments, the Cas nickase may be a component of the Cascade complex of a Type-I CRISPR/Cas system. In some embodiments, the Cas nickase may be a Cas3 protein. In some embodiments, the Cas nickase may be from a Type-III CRISPR/Cas system.

[0187] In some embodiments, a Cas nickase is a nickase form of a Cas nuclease or a modified Cas nuclease in which an endonucleolytic active site is inactivated, e.g., by one or more alterations (e.g., point mutations) in a catalytic domain. See, e.g., U.S. Pat. No. 8,889,356 for discussion of Cas nickases and exemplary catalytic domain alterations.

[0188] Wild type S. pyogenes Cas9 has two catalytic domains: RuvC and HNH. The RuvC domain cleaves the non-target DNA strand, and the HNH domain cleaves the target strand of DNA. In some embodiments, a Cas nuclease may comprise an amino acid substitution in the RuvC or RuvC-like nuclease domain. Exemplary amino acid substitutions in the RuvC or RuvC-like nuclease domain include D10A (based on the S. pyogenes Cas9 protein). See, e.g., Zetsche et al. (2015) Cell October 22:163(3): 759-771. In some embodiments, the Cas nuclease may comprise an amino acid substitution in the HNH or HNH-like nuclease domain. Exemplary amino acid substitutions in the HNH or HNH-like nuclease domain include E762A, H840A, N863A, H983A, and D986A (based on the S. pyogenes Cas9 protein). See, e.g., Zetsche et al. (2015). Further exemplary amino acid substitutions include D917A, E1006A, and D1255A (based on the Francisella novicida U112 Cpf1 (FnCpf1) sequence (UniProtKB—AOQ7Q2 (CPF1_FRATN)).

[0189] In some embodiments, a Cas nickase such as a Cas9 nickase has an inactivated RuvC or HNH domain. In some embodiments, a nickase is used having a RuvC domain with reduced activity. In some embodiments, a nickase is used having an inactive RuvC domain. In some embodiments, a nickase is used having an HNH domain with reduced activity. In some embodiments, a nickase is used having an inactive HNH domain.

[0190] In some embodiments, a Cas9 nickase has an active HNH nuclease domain and is able to cleave the non-targeted strand of DNA, i.e., the strand bound by the gRNA and has an inactive RuvC nuclease domain and is not able to cleave the targeted strand of the DNA, i.e., the strand where base editing by deaminase is desired.

[0191] An exemplary Cas9 nickase amino acid sequence is provided as SEQ ID NO: 70. An exemplary Cas9 nickase mRNA ORF sequence, which includes start and stop codons, is provided as SEQ ID NO: 71. An exemplary Cas9 nickase mRNA coding sequence, suitable for inclusion in a fusion protein, is provided as SEQ ID NO: 72.

[0192] In some embodiments, the RNA-guided nickase is a Class 2 Cas nickase described herein. In some embodiments, the RNA-guided nickase is a Cas9 nickase described herein.

[0193] In some embodiments, the RNA-guided nickase is an S. pyogenes Cas9 nickase described herein.

[0194] In some embodiments, the RNA-guided nickase is a D10A SpyCas9 nickase described herein. In some embodiments, the RNA-guided nickase comprises an amino acid sequence having at least 80%, 90%, 95%, 98%, or 99% identity to any one of SEQ ID NO: 70, 73, or 76. In some embodiments, the RNA-guided nickase comprises the amino acid sequence of SEQ ID NO: 70.

[0195] In some embodiments, the mRNA ORF sequence comprises encoding the RNA-guided nickase, which includes start and stop codons, comprises a nucleotide sequence having at least 80%, 90%, 95%, 98%, 99% or 100% identity to the nucleotide sequence of any one of SEQ ID NOs: 71, 74, or 77. In some embodiments, the mRNA sequence encoding the RNA-guided nickase comprises a nucleotide sequence having at least 80%, 90%, 95%, 98%, 99% or 100% identity to the nucleotide sequence of any one of SEQ ID NOs: 72, 75, or 78. In some embodiments, the level of identity is at least 90%. In some embodiments, the level of identity is at least 95%. In some embodiments, the level of identity is at least 98%. In some embodiments, the level of identity is at least 99%. In some embodiments, the level of identity is at least 100%. In some embodiments, the sequence encoding the RNA-guided nickase comprises the nucleotide sequence of any one of SEQ ID NOs: 71, 72, 74, 75, 77, or 78.

[0196] In some embodiments, the RNA-guided nickase is Neisseria meningitidis (Nme) Cas9 nickase described herein.

[0197] In some embodiments, the RNA-guided nickase is a D16A NmeCas9 nickase described herein. In some embodiments, the D16A NmeCas9 nickase is a D16A Nme2Cas9 nickase. In some embodiments, the D16A Nme2Cas9 nickase comprises an amino acid sequence at least 80%, 90%, 95%, 98%, 99% or 100% identical to SEQ ID NO: 387. In some embodiments, the sequence encoding the D16A Nme2Cas9 comprises a nucleotide sequence at least 80%, 90%, 95%, 98%, 99% or 100% identical to any one of SEQ ID NOs: 388-393.

[0198] E. Compositions Comprising a Cytidine Deaminase and an RNA-Guided Nickase

[0199] In some embodiments, an mRNA encoding a polypeptide comprising a cytidine deaminase and an RNA-guided nickase is provided, wherein the polypeptide does not comprise a uracil glycosylase inhibitor (UGI).

[0200] 1. Exemplary Compositions

[0201] As described herein, compositions, methods, and uses are provided comprising an mRNA comprising an open reading frame encoding a polypeptide comprising a cytidine deaminase and an RNA-guided nickase, wherein the polypeptide does not comprise a uracil glycosylase inhibitor (UGI). For each exemplary composition described below, the mRNA does not comprise a UGI.

[0202] In some embodiments, an mRNA encoding a polypeptide comprising a cytidine deaminase and an RNA-guided nickase is provided. In some embodiments, an enzyme of APOBEC family and an RNA-guided nickase is provided. In some embodiments, the polypeptide comprises an enzyme of APOBEC1 subgroup and an RNA-guided nickase. In some embodiments, the polypeptide comprises an enzyme of APOBEC2 subgroup and an RNA-guided nickase. In some embodiments, the polypeptide comprises an enzyme of APOBEC4 subgroup and an RNA-guided nickase. In some embodiments, the polypeptide comprises an enzyme of APOBEC3 subgroup and an RNA-guided nickase.

[0203] In some embodiments, an mRNA encoding a polypeptide comprising a cytidine deaminase and an RNA-guided nickase is provided. In some embodiments, an enzyme of APOBEC family and a D10A SpyCas9 nickase is provided. In some embodiments, the polypeptide comprises an enzyme of APOBEC1 subgroup and a D10A SpyCas9 nickase. In some embodiments, the polypeptide comprises an enzyme of APOBEC2 subgroup and a D10A SpyCas9 nickase. In some embodiments, the polypeptide comprises an enzyme of APOBEC4 subgroup and a D10A SpyCas9 nickase. In some embodiments, the polypeptide comprises an enzyme of APOBEC3 subgroup and a D10A SpyCas9 nickase.

[0204] In some embodiments, an mRNA encoding a polypeptide comprising a cytidine deaminase and an RNA-guided nickase is provided. In some embodiments, an enzyme of APOBEC family and a D16A NmeCas9 nickase is provided. In some embodiments, an enzyme of APOBEC family and a D16A Nme2Cas9 nickase is provided. In some embodiments, the polypeptide comprises an enzyme of APOBEC1 subgroup and a D16A Nme2Cas9 nickase. In some embodiments, the polypeptide comprises an enzyme of APOBEC2 subgroup and a D16A Nme2Cas9 nickase. In some embodiments, the polypeptide comprises an enzyme of APOBEC4 subgroup and a D16A Nme2Cas9 nickase. In some embodiments, the polypeptide comprises an enzyme of APOBEC3 subgroup and a D16A Nme2Cas9 nickase.

[0205] In some embodiments, the polypeptide lacks a UGI.

[0206] In some embodiments, the cytidine deaminase and the RNA-guided nickase are linked via a linker. In some embodiments, the cytidine deaminase and the RNA-guided nickase are linked via a peptide linker. In some embodiments, the peptide linker comprises one or more sequences selected from SEQ ID NOs: 46-59, 61 and 211-272.

[0207] In some embodiments, the polypeptide further comprises one or more additional heterologous functional domains. In some embodiments, the polypeptide further comprises one or more nuclear localization sequences (NLSs) (described herein) at the C-terminal of the polypeptide or the N-terminal of the polypeptide.

[0208] In some embodiments, an mRNA encoding a polypeptide comprising a cytidine deaminase and an RNA-guided nickase is provided. In some embodiments, an enzyme of APOBEC family and an RNA-guided nickase is provided. In some embodiments, the polypeptide comprises an enzyme of APOBEC1 subgroup and an RNA-guided nickase. In some embodiments, the polypeptide comprises an enzyme of APOBEC2 subgroup and an RNA-guided nickase. In some embodiments, the polypeptide comprises an enzyme of APOBEC4 subgroup and an RNA-guided nickase. In some embodiments, the polypeptide comprises an enzyme of APOBEC3 subgroup and an RNA-guided nickase.

[0209] In some embodiments, an mRNA encoding a polypeptide comprising a cytidine deaminase and an RNA-guided nickase is provided. In some embodiments, an enzyme of APOBEC family and a D10A SpyCas9 nickase, wherein the enzyme of APOBEC family and the D10A SpyCas9 nickase are fused via a linker. In some embodiments, the polypeptide comprises an enzyme of APOBEC family and a D10A SpyCas9 nickase, and a nuclear localization sequence (NLS) at the C-terminus of the fused polypeptide. In some embodiments, the polypeptide comprises an enzyme of APOBEC family and a D10A SpyCas9 nickase, and a NLS at the N-terminus of the fused polypeptide. In some embodiments, the polypeptide comprises an enzyme of APOBEC family and a D10A SpyCas9 nickase, wherein the enzyme of APOBEC family and the D10A SpyCas9 nickase are fused via a linker, and a NLS fused to the C-terminus of the D10A SpyCas9 nickase, optionally via a linker. In some embodiments, the polypeptide comprises an enzyme of APOBEC family and a D10A SpyCas9 nickase, wherein the enzyme of APOBEC family and the D10A SpyCas9 nickase are fused via a linker, and a NLS fused to the C-terminus of the D10A SpyCas9 nickase, optionally via a linker.

[0210] In some embodiments, the polypeptide comprises an enzyme of APOBEC family and a D16A NmeCas9 nickase, wherein the enzyme of APOBEC family and the D16A NmeCas9 nickase are fused via a linker. In some embodiments, the polypeptide comprises an enzyme of APOBEC family and a D16A Nme2Cas9 nickase, wherein the enzyme of APOBEC family and the D16A Nme2Cas9 nickase are fused via a linker. In some embodiments, the polypeptide comprises an enzyme of APOBEC family and a D16A Nme2Cas9 nickase, and a nuclear localization sequence (NLS) at the C-terminus of the fused polypeptide. In some embodiments, the polypeptide comprises an enzyme of APOBEC family and a D16A Nme2Cas9 nickase, and a NLS at the N-terminus of the fused polypeptide. In some embodiments, the polypeptide comprises an enzyme of APOBEC family and a D16A Nme2Cas9 nickase, wherein the enzyme of APOBEC family and the D16A Nme2Cas9 nickase are fused via a linker, and a NLS fused to the C-terminus of the D16A Nme2Cas9 nickase, optionally via a linker. In some embodiments, the polypeptide comprises an enzyme of APOBEC family and a D16A Nme2Cas9 nickase, wherein the enzyme of APOBEC family and the D16A Nme2Cas9 nickase are fused via a linker, and a NLS fused to the C-terminus of the D16A Nme2Cas9 nickase, optionally via a linker.

[0211] In some embodiments, the polypeptide comprises an enzyme of APOBEC1 subgroup and a D10A SpyCas9 nickase, wherein the enzyme of APOBEC1 subgroup and the D10A SpyCas9 nickase are fused via a linker. In some embodiments, the polypeptide comprises an enzyme of APOBEC1 subgroup and a D10A SpyCas9 nickase, and a nuclear localization sequence (NLS) at the C-terminus of the fused polypeptide. In some embodiments, the polypeptide comprises an enzyme of APOBEC1 subgroup and a D10A SpyCas9 nickase, and a NLS at the N-terminus of the fused polypeptide. In some embodiments, the polypeptide comprises an enzyme of APOBEC1 subgroup and a D10A SpyCas9 nickase, wherein the enzyme of APOBEC1 subgroup and the D10A SpyCas9 nickase are fused via a linker, and a NLS fused to the C-terminus of the D10A SpyCas9 nickase, optionally via a linker. In some embodiments, the polypeptide comprises an enzyme of APOBEC1 subgroup and a D10A SpyCas9 nickase, wherein the enzyme of APOBEC1 subgroup and the D10A SpyCas9 nickase are fused via a linker, and a NLS fused to the C-terminus of the D10A SpyCas9 nickase, optionally via a linker.

[0212] In some embodiments, the polypeptide comprises an enzyme of APOBEC1 subgroup and a D16A Nme2Cas9 nickase, wherein the enzyme of APOBEC1 subgroup and the D16A Nme2Cas9 nickase are fused via a linker. In some embodiments, the polypeptide comprises an enzyme of APOBEC1 subgroup and a D16A Nme2Cas9 nickase, wherein the enzyme of APOBEC1 subgroup and the D16A Nme2Cas9 nickase are fused via a linker. In some embodiments, the polypeptide comprises an enzyme of APOBEC1 subgroup and a D16A Nme2Cas9 nickase, and a nuclear localization sequence (NLS) at the C-terminus of the fused polypeptide. In some embodiments, the polypeptide comprises an enzyme of APOBEC1 subgroup and a D16A Nme2Cas9 nickase, and a NLS at the N-terminus of the fused polypeptide. In some embodiments, the polypeptide comprises an enzyme of APOBEC1 subgroup and a D16A Nme2Cas9 nickase, wherein the enzyme of APOBEC1 subgroup and the D16A Nme2Cas9 nickase are fused via a linker, and a NLS fused to the C-terminus of the D16A Nme2Cas9 nickase, optionally via a linker. In some embodiments, the polypeptide comprises an enzyme of APOBEC1 subgroup and a D16A Nme2Cas9 nickase, wherein the enzyme of APOBEC1 subgroup and the D16A Nme2Cas9 nickase are fused via a linker, and a NLS fused to the C-terminus of the D16A Nme2Cas9 nickase, optionally via a linker.

[0213] In some embodiments, the polypeptide comprises an enzyme of APOBEC3 subgroup and a D10A SpyCas9 nickase, wherein the enzyme of APOBEC3 subgroup and the D10A SpyCas9 nickase are fused via a linker. In some embodiments, the polypeptide comprises an enzyme of APOBEC3 subgroup and a D10A SpyCas9 nickase, and a nuclear localization sequence (NLS) at the C-terminus of the fused polypeptide. In some embodiments, the polypeptide comprises an enzyme of APOBEC3 subgroup and a D10A SpyCas9 nickase, and a NLS at the N-terminus of the fused polypeptide. In some embodiments, the polypeptide comprises an enzyme of APOBEC3 subgroup and a D10A SpyCas9 nickase, wherein the enzyme of APOBEC3 subgroup and the D10A SpyCas9 nickase are fused via a linker, and a NLS fused to the C-terminus of the D10A SpyCas9 nickase, optionally via a linker. In some embodiments, the polypeptide comprises an enzyme of APOBEC3 subgroup and a D10A SpyCas9 nickase, wherein the enzyme of APOBEC3 subgroup and the D10A SpyCas9 nickase are fused via a linker, and a NLS fused to the C-terminus of the D10A SpyCas9 nickase, optionally via a linker.

[0214] In some embodiments, the polypeptide comprises an enzyme of APOBEC3 subgroup and a D16A Nme2Cas9 nickase, wherein the enzyme of APOBEC3 subgroup and the D16A Nme2Cas9 nickase are fused via a linker. In some embodiments, the polypeptide comprises an enzyme of APOBEC3 subgroup and a D16A Nme2Cas9 nickase, wherein the enzyme of APOBEC3 subgroup and the D16A Nme2Cas9 nickase are fused via a linker. In some embodiments, the polypeptide comprises an enzyme of APOBEC3 subgroup and a D16A Nme2Cas9 nickase, and a nuclear localization sequence (NLS) at the C-terminus of the fused polypeptide. In some embodiments, the polypeptide comprises an enzyme of APOBEC3 subgroup and a D16A Nme2Cas9 nickase, and a NLS at the N-terminus of the fused polypeptide. In some embodiments, the polypeptide comprises an enzyme of APOBEC3 subgroup and a D16A Nme2Cas9 nickase, wherein the enzyme of APOBEC3 subgroup and the D16A Nme2Cas9 nickase are fused via a linker, and a NLS fused to the C-terminus of the D16A Nme2Cas9 nickase, optionally via a linker. In some embodiments, the polypeptide comprises an enzyme of APOBEC3 subgroup and a D16A Nme2Cas9 nickase, wherein the enzyme of APOBEC3 subgroup and the D16A Nme2Cas9 nickase are fused via a linker, and a NLS fused to the C-terminus of the D16A Nme2Cas9 nickase, optionally via a linker.

[0215] In some embodiments, the polypeptide comprises a D10A SpyCas9 nickase, a linker comprising the amino acid sequence of SEQ ID NO: 268, and a cytidine deaminase comprising an amino acid sequence that is at least 85% identical to any one of SEQ ID NOs: 40, 41, 976, 977, 979, 980, 984-987, 993-1006, and 1009. In some embodiments, the polypeptide comprises a D10A SpyCas9 nickase, a linker comprising the amino acid sequence of SEQ ID NO: 269, and a cytidine deaminase comprising an amino acid sequence that is at least 85% identical to any one of SEQ ID NOs: 40, 41, 976, 977, 979, 980, 984-987, 993-1006, and 1009. In some embodiments, the polypeptide comprises a D10A SpyCas9 nickase, a linker comprising the amino acid sequence of SEQ ID NO: 270, and a cytidine deaminase comprising an amino acid sequence that is at least 85% identical to any one of SEQ ID NOs: 40, 41, 976, 977, 979, 980, 984-987, 993-1006, and 1009. In some embodiments, the polypeptide comprises a D10A SpyCas9 nickase, a linker comprising the amino acid sequence of SEQ ID NO: 271, and a cytidine deaminase comprising an amino acid sequence that is at least 85% identical to any one of SEQ ID NOs: 40, 41, 976, 977, 979, 980, 984-987, 993-1006, and 1009. In some embodiments, the polypeptide comprises a D10A SpyCas9 nickase, a linker comprising the amino acid sequence of SEQ ID NO: 272, and a cytidine deaminase comprising an amino acid sequence that is at least 85% identical to any one of SEQ ID NOs: 40, 41, 976, 977, 979, 980, 984-987, 993-1006, and 1009. In any of the foregoing embodiments, the D10A SpyCas9 nickase may comprise an amino acid sequence that is at least 85%, at least 90%, at least 95%, at least 98%, at least 99%, or 100% identical to any one of SEQ ID NOs: 70, 73, or 76.

[0216] In some embodiments, the polypeptide comprises a D16A Nme2Cas9 nickase, a linker comprising the amino acid sequence of SEQ ID NO: 268, and a cytidine deaminase comprising an amino acid sequence that is at least 85% identical to any one of SEQ ID NOs: 40, 41, 976, 977, 979, 980, 984-987, 993-1006, and 1009. In some embodiments, the polypeptide comprises a D16A Nme2Cas9 nickase, a linker comprising the amino acid sequence of SEQ ID NO: 269, and a cytidine deaminase comprising an amino acid sequence that is at least 85% identical to any one of SEQ ID NOs: 40, 41, 976, 977, 979, 980, 984-987, 993-1006, and 1009. In some embodiments, the polypeptide comprises a D16A Nme2Cas9 nickase, a linker comprising the amino acid sequence of SEQ ID NO: 270, and a cytidine deaminase comprising an amino acid sequence that is at least 85% identical to any one of SEQ ID NOs: 40, 41, 976, 977, 979, 980, 984-987, 993-1006, and 1009. In some embodiments, the polypeptide comprises a D16A Nme2Cas9 nickase, a linker comprising the amino acid sequence of SEQ ID NO: 271, and a cytidine deaminase comprising an amino acid sequence that is at least 85% identical to any one of SEQ ID NOs: 40, 41, 976, 977, 979, 980, 984-987, 993-1006, and 1009. In some embodiments, the polypeptide comprises a D16A Nme2Cas9 nickase, a linker comprising the amino acid sequence of SEQ ID NO: 272, and a cytidine deaminase comprising an amino acid sequence that is at least 85% identical to any one of SEQ ID NOs: 40, 41, 976, 977, 979, 980, 984-987, 993-1006, and 1009. In any of the foregoing embodiments, the D16A Nme2Cas9 nickase may comprise an amino acid sequence that is at least 85%, at least 90%, at least 95%, at least 98%, at least 99%, or 100% identical to SEQ ID NO: 387.

[0217] In some embodiments, the polypeptide comprises a D10A SpyCas9 nickase, a linker comprising the amino acid sequence of SEQ ID NO: 268, and a cytidine deaminase comprising an amino acid sequence selected from any one of SEQ ID NOs: 40, 41, 976, 977, 979, 980, 984-987, 993-1006, and 1009. In some embodiments, the polypeptide comprises a D10A SpyCas9 nickase, a linker comprising the amino acid sequence of SEQ ID NO: 269, and a cytidine deaminase comprising an amino acid sequence selected from any one of SEQ ID NOs: 40, 41, 976, 977, 979, 980, 984-987, 993-1006, and 1009. In some embodiments, the polypeptide comprises a D10A SpyCas9 nickase, a linker comprising the amino acid sequence of SEQ ID NO: 270, and a cytidine deaminase comprising an amino acid sequence selected from any one of SEQ ID NOs: 40, 41, 976, 977, 979, 980, 984-987, 993-1006, and 1009. In some embodiments, the polypeptide comprises a D10A SpyCas9 nickase, a linker comprising the amino acid sequence of SEQ ID NO: 271, and a cytidine deaminase comprising an amino acid sequence selected from any one of SEQ ID NOs: 40, 41, 976, 977, 979, 980, 984-987, 993-1006, and 1009. In some embodiments, the polypeptide comprises a D10A SpyCas9 nickase, a linker comprising the amino acid sequence of SEQ ID NO: 272, and a cytidine deaminase comprising an amino acid sequence selected from any one of SEQ ID NOs: 40, 41, 976, 977, 979, 980, 984-987, 993-1006, and 1009. In any of the foregoing embodiments, the D10A SpyCas9 comprises an amino acid sequence that is at least 85%, at least 90%, at least 95%, at least 98%, at least 99%, or 100% identical to any one of SEQ ID NOs: 70, 73, or 76.

[0218] In some embodiments, the polypeptide comprises a D16A Nme2Cas9 nickase, a linker comprising the amino acid sequence of SEQ ID NO: 268, and a cytidine deaminase comprising an amino acid sequence selected from any one of SEQ ID NOs: 40, 41, 976, 977, 979, 980, 984-987, 993-1006, and 1009. In some embodiments, the polypeptide comprises a D16A Nme2Cas9 nickase, a linker comprising the amino acid sequence of SEQ ID NO: 269, and a cytidine deaminase comprising an amino acid sequence selected from any one of SEQ ID NOs: 40, 41, 976, 977, 979, 980, 984-987, 993-1006, and 1009. In some embodiments, the polypeptide comprises a D16A Nme2Cas9 nickase, a linker comprising the amino acid sequence of SEQ ID NO: 270, and a cytidine deaminase comprising an amino acid sequence selected from any one of SEQ ID NOs: 40, 41, 976, 977, 979, 980, 984-987, 993-1006, and 1009. In some embodiments, the polypeptide comprises a D16A Nme2Cas9 nickase, a linker comprising the amino acid sequence of SEQ ID NO: 271, and a cytidine deaminase comprising an amino acid sequence selected from any one of SEQ ID NOs: 40, 41, 976, 977, 979, 980, 984-987, 993-1006, and 1009. In some embodiments, the polypeptide comprises a D16A Nme2Cas9 nickase, a linker comprising the amino acid sequence of SEQ ID NO: 272, and a cytidine deaminase comprising an amino acid sequence selected from any one of SEQ ID NOs: 40, 41, 976, 977, 979, 980, 984-987, 993-1006, and 1009. In any of the foregoing embodiments, the D16A Nme2Cas9 nickase comprises an amino acid sequence that is at least 85%, at least 90%6, at least 95%, at least 98%, at least 99% or 100% identical to SEQ ID NO: 387.

[0219] The polypeptide may be organized in any number of ways to form a single chain. The NLS can be N- or C-terminal, or both N- and C-terminals, and the cytidine deaminase can be N- or C-terminal as compared the RNA-guided nickase. In some embodiments, the polypeptide comprises, from N to C terminus, a cytidine deaminase, an optional linker, an RNA-guided nickase, and an optional NLS. In some embodiments, the polypeptide comprises, from N to C terminus, an RNA-guided nickase, an optional linker, a cytidine deaminase, and an optional NLS. In some embodiments, the polypeptide comprises, from N to C terminus, an optional NLS, an RNA-guided nickase, an optional linker, and a cytidine deaminase. In some embodiments, the polypeptide comprises, from N to C terminus, an optional NLS, an RNA-guided nickase, an optional linker, and a cytidine deaminase, and an optional NLS.

[0220] In some embodiments, the polypeptide comprises, from N to C terminus, an optional NLS, an enzyme of APOBEC family, an optional linker, an RNA-guided nickase, and an optional NLS. In some embodiments, the polypeptide comprises, from N to C terminus, an optional NLS, an RNA-guided nickase, an optional linker, an enzyme of APOBEC family and an optional NLS. In some embodiments, the polypeptide comprises, from N to C terminus, an optional NLS, an RNA-guided nickase, an optional linker, an enzyme of APOBEC family, and an optional NLS. In some embodiments, the polypeptide comprises, from N to C terminus, an optional NLS, an RNA-guided nickase, an optional linker, an enzyme of APOBEC family, and an optional NLS.

[0221] In some embodiments, the polypeptide comprises, from N to C terminus, an optional NLS, an enzyme of APOBEC3 subgroup, an optional linker, an RNA-guided nickase, and an optional NLS. In some embodiments, the polypeptide comprises, from N to C terminus, an optional NLS, an RNA-guided nickase, an optional linker, an enzyme of APOBEC3 subgroup and an optional NLS. In some embodiments, the polypeptide comprises, from N to C terminus, an optional NLS, an RNA-guided nickase, an optional linker, an enzyme of APOBEC3 subgroup, and an optional NLS. In some embodiments, the polypeptide comprises, from N to C terminus, an optional NLS, an RNA-guided nickase, an optional linker, an enzyme of APOBEC3 subgroup, and an optional NLS.

[0222] In some embodiments, the polypeptide comprises, from N to C terminus, an optional NLS, an enzyme of APOBEC family, an optional linker, a D10A SpyCas9 nickase or a D16A Nme2Cas9 nickase, and an optional NLS. In some embodiments, the polypeptide comprises, from N to C terminus, an optional NLS, a D10A SpyCas9 nickase or a D16A Nme2Cas9 nickase, an optional linker, an enzyme of APOBEC family and an optional NLS. In some embodiments, the polypeptide comprises, from N to C terminus, an optional NLS, a D10A SpyCas9 nickase or a D16A Nme2Cas9 nickase, an optional linker, an enzyme of APOBEC family, and an optional NLS. In some embodiments, the polypeptide comprises, from N to C terminus, an optional NLS, a D10A SpyCas9 nickase or a D16A Nme2Cas9 nickase, an optional linker, and an enzyme of APOBEC family, and an optional NLS.

[0223] In some embodiments, the polypeptide comprises, from N to C terminus, an optional NLS, an enzyme of APOBEC3 subgroup, an optional linker, a D10A SpyCas9 nickase or a D16A Nme2Cas9 nickase, and an optional NLS. In some embodiments, the polypeptide comprises, from N to C terminus, an optional NLS, a D10A SpyCas9 nickase or a D16A Nme2Cas9 nickase, an optional linker, an enzyme of APOBEC3 subgroup and an optional NLS. In some embodiments, the polypeptide comprises, from N to C terminus, an optional NLS, a D10A SpyCas9 nickase or a D16A Nme2Cas9 nickase, an optional linker, an enzyme of APOBEC3 subgroup, and an optional NLS. In some embodiments, the polypeptide comprises, from N to C terminus, an optional NLS, a D10A SpyCas9 nickase or a D16A Nme2Cas9 nickase, an optional linker, and an enzyme of APOBEC3 subgroup, and an optional NLS.

[0224] In some embodiments, the polypeptide comprises, from N to C terminus, an optional NLS, an enzyme of APOBEC3 subgroup, an optional linker, a D16A Nme2Cas9 nickase.

[0225] In some embodiments, the polypeptide comprises, from N to C terminus, (i) an optional NLS; (ii) a cytidine deaminase comprising an amino acid sequence that is at least 80% identical to any one of SEQ ID NOs: 40, 41, and 960-1023; (iii) a linker comprising one or more sequences selected from SEQ ID NOs: 46-59, 61 and 211-272, (iv) a D10A SpyCas9 nickase or a D16A Nme2Cas9 nickase, and (v) an optional NLS.

[0226] In some embodiments, the polypeptide comprises, from N to C terminus, (i) an optional NLS, (ii) a D10A SpyCas9 nickase or a D16A Nme2Cas9 nickase, (iii) a linker comprising one or more sequences selected from SEQ ID NOs: 46-59, 61 and 211-272, (iv) a cytidine deaminase comprising an amino acid sequence that is at least 80% identical to any one of SEQ ID NOs: 40, 41, and 960-1023, and (v) an optional NLS.

[0227] In some embodiments, the polypeptide comprises, from N to C terminus, (i) an optional NLS, (ii) a D10A SpyCas9 nickase or a D16A Nme2Cas9 nickase, (iii) a linker comprising one or more sequences selected from SEQ ID NOs: 46-59, 61 and 211-272, (iv) a cytidine deaminase comprising an amino acid sequence that is at least 80% identical to any one of SEQ ID NOs: 40, 41, and 960-1023, and (v) an optional NLS.

[0228] In some embodiments, the polypeptide comprises, from N to C terminus, (i) an optional NLS, (ii) a D10A SpyCas9 nickase or a D16A Nme2Cas9 nickase, (iii) a linker comprising one or more sequences selected from SEQ ID NOs: 46-59, 61 and 211-272, (iv) cytidine deaminase comprising an amino acid sequence that is at least 80% identical to any one of SEQ ID NOs: 40, 41, and 960-1023, and (v) an optional NLS.

[0229] In some embodiments, the polypeptide comprises, from N to C terminus, (i) an optional NLS, (ii) a cytidine deaminase comprising an amino acid sequence that is at least 80% identical to any one of SEQ ID NOs: 40, 41, and 960-1023; (iii) a linker comprising one or more sequences selected from SEQ ID NOs: 46-59, 61 and 211-272, (iv) a D10A SpyCas9 nickase or a D16A Nme2Cas9 nickase, and (v) an optional NLS.

[0230] In some embodiments, the polypeptide comprises, from N to C terminus, (i) an optional NLS, (ii) a D10A SpyCas9 nickase or a D16A Nme2Cas9 nickase, (iii) a linker comprising one or more sequences selected from SEQ ID NOs: 46-59, 61 and 211-272, (iv) a cytidine deaminase comprising an amino acid sequence that is at least 80% identical to any one of SEQ ID NOs: 40, 41, and 960-1023, and (v) an optional NLS.

[0231] In some embodiments, the polypeptide comprises, from N to C terminus, (i) an optional NLS, (ii) a D10A SpyCas9 nickase or a D16A Nme2Cas9 nickase, (iii) a linker comprising one or more sequences selected from SEQ ID NOs: 46-59, 61 and 211-272, (iv) a cytidine deaminase comprising an amino acid sequence that is at least 80% identical to any one of SEQ ID NOs: 40, 41, and 960-1023, and (v) an optional NLS.

[0232] In some embodiments, the polypeptide comprises, from N to C terminus, (i) an optional NLS, (ii) a D10A SpyCas9 nickase or a D16A Nme2Cas9 nickase, (iii) a linker comprising one or more sequences selected from SEQ ID NOs: 46-59, 61 and 211-272, and (iv) cytidine deaminase comprising an amino acid sequence that is at least 80% identical to any one of SEQ ID NOs: 40, 41, and 960-1023, and (v) an optional NLS.

[0233] 2. Compositions Comprising an APOBEC3A Deaminase and an RNA-Guided Nickase

[0234] In some embodiments, an mRNA encoding a polypeptide comprising an APOBEC3A deaminase (A3A) and an RNA-guided nickase is provided. In some embodiments, the polypeptide comprises a human A3A and an RNA-guided nickase. In some embodiments, the polypeptide comprises a wild-type A3A and an RNA-guided nickase. In some embodiments, the polypeptide comprises an A3A variant and an RNA-guided nickase. In some embodiments, the polypeptide comprises an A3A and a Cas9 nickase. In some embodiments, the polypeptide comprises an A3A and a D10A SpyCas9 nickase. In some embodiments, the polypeptide comprises a human A3A and a D10A SpyCas9 nickase. In some embodiments, the polypeptide comprises an A3A variant and a D10A SpyCas9 nickase. In some embodiments, the polypeptide lacks a UGI. In some embodiments, the A3A and the RNA-guided nickase are linked via a linker. In some embodiments, the polypeptide further comprises one or more additional heterologous functional domains. In some embodiments, the polypeptide further comprises a nuclear localization sequence (NLS) (described herein) at the C-terminal of the polypeptide or the N-terminal of the polypeptide.

[0235] In some embodiments, the polypeptide comprises a human A3A and a D10A SpyCas9 nickase, wherein the human A3A and the D10A SpyCas9 nickase are fused via a linker. In some embodiments, the polypeptide comprises a human A3A and a D10A SpyCas9 nickase, and a nuclear localization sequence (NLS) at the C-terminus of the fused polypeptide. In some embodiments, the polypeptide comprises a human A3A and a D10A SpyCas9 nickase, and a NLS at the N-terminus of the fused polypeptide. In some embodiments, the polypeptide comprises a human A3A and a D10A SpyCas9 nickase, wherein the human A3A and the DOA SpyCas9 nickase are fused via a linker, and a NLS fused to the C-terminus of the DOA SpyCas9 nickase, optionally via a linker. In some embodiments, the polypeptide comprises a human A3A and a D10A SpyCas9 nickase, wherein the human A3A and the DOA SpyCas9 nickase are fused via a linker, and a NLS fused to the C-terminus of the D10A SpyCas9 nickase, optionally via a linker.

[0236] The polypeptide may be organized in any number of ways to form a single chain. The NLS can be N- or C-terminal, or both N- and C-terminals. and the A3A can be N- or C-terminal as compared the RNA-guided nickase. In some embodiments, the polypeptide comprises, from N to C terminus, an A3A, an optional linker, an RNA-guided nickase, and an optional NLS. In some embodiments, the polypeptide comprises, from N to C terminus, an RNA-guided nickase, an optional linker, an A3A, and an optional NLS. In some embodiments, the polypeptide comprises, from N to C terminus, an optional NLS, an RNA-guided nickase, an optional linker, and an A3A. In some embodiments, the polypeptide comprises, from N to C terminus, an optional NLS, an RNA-guided nickase, an optional linker, and an A3A, and an optional NLS.

[0237] In any of the foregoing embodiments, the polypeptide may comprise an amino acid sequence having at least 80% identity to SEQ ID NOs: 3 or 6. In some embodiments, any of the foregoing levels of identity is at least 85%, at least 90%, at least 95%, at least 98%, at least 99%, or 100%. In some embodiments, the polypeptide disclosed herein may comprise an amino acid sequence with at least 90% identity to SEQ ID NOs: 3 or 6. In some embodiments, the polypeptide disclosed herein may comprise an amino acid sequence with at least 95% identity to SEQ ID NOs: 3 or 6. In some embodiments, the polypeptide disclosed herein may comprise an amino acid sequence with at least 98% identity to SEQ ID NOs: 3 or 6. In some embodiments, the polypeptide disclosed herein may comprise an amino acid sequence with at least 99% identity to SEQ ID NOs: 3 or 6. In some embodiments, the polypeptide disclosed herein may comprise an amino acid sequence of SEQ ID NOs: 3 or 6.

[0238] In any of the foregoing embodiments, a nucleic acid sequence comprising an open reading frame encoding the polypeptide disclosed herein may comprise a nucleic acid sequence having at least 80% identity to SEQ ID NOs: 2 or 5. In some embodiments, any of the foregoing levels of identity is at least 85%, at least 90%, at least 95%, at least 98%, at least 99%, or 100%.

[0239] In any of the foregoing embodiments, an mRNA sequence encoding the polypeptide disclosed herein may comprise a nucleic acid sequence having at least 80% identity to SEQ ID NOs: 1 or 4. In some embodiments, any of the foregoing levels of identity is at least 85%, at least 90%, at least 95%, at least 98%, at least 99%, or 100%.

[0240] In any of the foregoing embodiments, the polypeptide may comprise an amino acid sequence having at least 80%, at least 90%, at least 95%, at least 98%, at least 99%, or 100% identity to SEQ ID NOs: 303, 306, 309, or 312. In some embodiments, the polypeptide disclosed herein may comprise an amino acid sequence of SEQ ID NOs: 303, 306, 309, or 312. In any of the foregoing embodiments, a nucleic acid sequence comprising an open reading frame encoding the polypeptide disclosed herein may comprise a nucleic acid sequence having at least 80%, at least 90%, at least 95%, at least 98%, at least 99%, or 100% identity to SEQ ID NOs: SEQ ID NOs: 302, 305, 308, or 311. In some embodiments, a nucleic acid sequence comprising an open reading frame encoding the polypeptide disclosed herein comprises a nucleic acid sequence of SEQ ID NOs: SEQ ID NOs: 302, 305, 308, or 311. In any of the foregoing embodiments, an mRNA sequence encoding the polypeptide disclosed herein may comprise a nucleic acid sequence having at least 80%, at least 90%, at least 95%, at least 98%, at least 99%, or 100% identity to SEQ ID NOs: 301, 304, 307, or 310. In any of the foregoing embodiments, an mRNA sequence encoding the polypeptide disclosed herein may comprise a nucleic acid sequence of SEQ ID NOs: 301, 304, 307, or 310.

[0241] In any of the foregoing embodiments, the A3A may comprise an amino acid sequence having at least 80% identity to SEQ ID NO: 40. In some embodiments, the level of identity is at least 85%, at least 87%, at least 90%, at least 95%, at least 98%, at least 99%, or 100%. In some embodiments, the A3A comprises an amino acid sequence of SEQ ID NO: 40.

[0242] In any of the foregoing embodiments, the RNA-guided nickase may comprise an amino acid sequence having at least 80%, 90%, 95%, 98%, or 99% identity to any one of SEQ ID NOs: 70, 73, or 76. In some embodiments, the level of identity is at least 85%, at least 87%, at least 90%, at least 95%, at least 98%, at least 99%, or 100%. In some embodiments, the RNA-guided nickase comprises the amino acid sequence of SEQ ID NO: 70. In some embodiments, the RNA-guided nickase comprises the amino acid sequence of SEQ ID NO: 73. In some embodiments, the RNA-guided nickase comprises the amino acid sequence of SEQ ID NO: 76.

[0243] In any of the foregoing embodiments, the A3A may comprise an amino acid sequence having at least 80% identity to SEQ ID NO: 40 and the RNA-guided nickase may comprise an amino acid sequence having at least 80%, 90%, 95%, 98%, or 99% identity to any one of SEQ ID NOs: 70, 73, or 76. In some embodiments, the A3A comprises an amino acid sequence of SEQ ID NO: 40 and the RNA-guided nickase comprises an amino acid sequence of SEQ ID NO: 70.

[0244] F. Additional Features

[0245] 1. Codon-Optimization

[0246] In some embodiments, the UGI or polypeptide comprising a cytidine deaminase (e.g., an APOBEC3A deaminase) and an RNA-guided nickase is encoded by an open reading frame (ORF) comprising a codon optimized nucleic acid sequence. In some embodiment, the codon optimized nucleic acid sequence comprises minimal adenine codons and/or minimal uridine codons.

[0247] A given ORF can be reduced in uridine content or uridine dinucleotide content, for example, by using minimal uridine codons in a sufficient fraction of the ORF. For example, an amino acid sequence for the polypeptide described herein can be back-translated into an ORF sequence by converting amino acids to codons, wherein some or all of the ORF uses the exemplary minimal uridine codons shown below. In some embodiments, at least about 50%, 55%, 60%, 65%, 70%, 75%, 80%, 85%, 90%, 95%, 98%, 99%, or 100% of the codons in the ORF are codons listed in Table 1.

TABLE 1
Exemplary minimal uridine codons

| | Amino Acid | Minimal uridine codon |
|---|---|---|
| A | Alanine | GCA or GCC or GCG |
| G | Glycine | GGA or GGC or GGG |
| V | Valine | GUC or GUA or GUG |
| D | Aspartic acid | GAC |
| E | Glutamic acid | GAA or GAG |
| I | Isoleucine | AUC or AUA |
| T | Threonine | ACA or ACC or ACG |
| N | Asparagine | AAC |
| K | Lysine | AAG or AAA |
| S | Serine | AGC |
| R | Arginine | AGA or AGG |
| L | Leucine | CUG or CUA or CUC |
| P | Proline | CCG or CCA or CCC |
| H | Histidine | CAC |
| Q | Glutamine | CAG or CAA |
| F | Phenylalanine | UUC |
| Y | Tyrosine | UAC |
| C | Cysteine | UGC |
| W | Tryptophan | UGG |
| M | Methionine | AUG |

[0248] In some embodiments, the ORF may consist of a set of codons of which at least about 75%, 80%, 85%, 90%, 95%, 98%, 99%, or 100% of the codons are codons listed in Table 1.

[0249] A given ORF can be reduced in adenine content or adenine dinucleotide content, for example, by using minimal adenine codons in a sufficient fraction of the ORF. For example, an amino acid sequence for the polypeptide described herein can be back-translated into an ORF sequence by converting amino acids to codons, wherein some or all of the ORF uses the exemplary minimal adenine codons shown below. In some embodiments, at least about 50%, 55%, 60%, 65%, 70%, 75%, 80%, 85%, 90%, 95%, 98%, 99%, or 100% of the codons in the ORF are codons listed in Table 2.

TABLE 2
Exemplary minimal adenine codons

| | Amino Acid | Minimal adenine codon |
|---|---|---|
| A | Alanine | GCU or GCC or GCG |
| G | Glycine | GGU or GGC or GGG |
| V | Valine | GUC or GUU or GUG |
| D | Aspartic acid | GAC or GAU |
| E | Glutamic acid | GAG |
| I | Isoleucine | AUC or AUU |
| T | Threonine | ACU or ACC or ACG |
| N | Asparagine | AAC or AAU |
| K | Lysine | AAG |
| S | Serine | UCU or UCC or UCG |
| R | Arginine | CGU or CGC or CGG |
| L | Leucine | CUG or CUC or CUU |
| P | Proline | CCG or CCU or CCC |
| H | Histidine | CAC or CAU |
| Q | Glutamine | CAG |
| F | Phenylalanine | UUC or UUU |
| Y | Tyrosine | UAC or UAU |
| C | Cysteine | UGC or UGU |
| W | Tryptophan | UGG |
| M | Methionine | AUG |

[0250] In some embodiments, the ORF may consist of a set of codons of which at least about 75%, 80%, 85%, 90%, 95%, 98%, 99%, or 100% of the codons are codons listed in Table 2.

[0251] To the extent feasible, any of the features described above with respect to low adenine content can be combined with any of the features described above with respect to low uridine content. So too for uridine and adenine dinucleotides. Similarly, the content of uridine nucleotides and adenine dinucleotides in the ORF may be as set forth above. Similarly, the content of uridine dinucleotides and adenine nucleotides in the ORF may be as set forth above.

[0252] A given ORF can be reduced in uridine and adenine nucleotide and/or dinucleotide content, for example, by using minimal uridine and adenine codons in a sufficient fraction of the ORF. For example, an amino acid sequence for the polypeptide described herein can be back-translated into an ORF sequence by converting amino acids to codons, wherein some or all of the ORF uses the exemplary minimal uridine and adenine codons shown below. In some embodiments, at least about 50%, 55%, 60%, 65%, 70%, 75%, 80%, 85%, 90%, 95%, 98%, 99%, or 100% of the codons in the ORF are codons listed in Table 3.

TABLE 3
Exemplary minimal uridine and adenine codons

| | | Minimal uridine and |
|---|---|---|
| | Amino Acid | adenine codon |
| A | Alanine | GCC or GCG |
| G | Glycine | GGC or GGG |
| V | Valine | GUC or GUG |
| D | Aspartic acid | GAC |
| E | Glutamic acid | GAG |
| I | Isoleucine | AUC |
| T | Threonine | ACC or ACG |
| N | Asparagine | AAC |
| K | Lysine | AAG |
| S | Serine | AGC or UCC or UCG |
| R | Arginine | CGC or CGG |
| L | Leucine | CUG or CUC |
| P | Proline | CCG or CCC |
| H | Histidine | CAC |
| Q | Glutamine | CAG |
| F | Phenylalanine | UUC |
| Y | Tyrosine | UAC |
| C | Cysteine | UGC |
| W | Tryptophan | UGG |
| M | Methionine | AUG |

[0253] In some embodiments, the ORF may consist of a set of codons of which at least about 75%, 80%, 85%, 90%, 95%, 98%, 99%, or 100% of the codons are codons listed in Table 3. As can be seen in Table 3, each of the three listed serine codons contains either one A or one U. In some embodiments, uridine minimization is prioritized by using AGC codons for serine. In some embodiments, adenine minimization is prioritized by using UCC and/or UCG codons for serine.

[0254] In some embodiments, the ORF may have codons that increase translation in a mammal, such as a human. In further embodiments, the mRNA comprises an ORF having codons that increase translation in an organ, such as the liver, of the mammal, e.g., a human. In further embodiments, the ORF may have codons that increase translation in a cell type, such as a hepatocyte, of the mammal, e.g., a human. An increase in translation in a mammal, cell type, organ of a mammal, human, organ of a human, etc., can be determined relative to the extent of translation wild-type sequence of the ORF, or relative to an ORF having a codon distribution matching the codon distribution of the organism from which the ORF was derived or the organism that contains the most similar ORF at the amino acid level. Alternatively, in some embodiments, an increase in translation for a Cas9 sequence in a mammal, cell type, organ of a mammal, human, organ of a human, etc., is determined relative to translation of an ORF with the sequence of SEQ ID NO: 2 or 5 with all else equal, including any applicable point mutations, heterologous domains, and the like. In some embodiments, at least about 75%, 80%, 85%, 90%, 95%, 96%, 97%, 98%, 99%, or 100% of the codons in an ORF are codons corresponding to highly expressed tRNAs (e.g., the highest-expressed tRNA for each amino acid) in a mammal, such as a human. In some embodiments, at least 75%, 80%, 85%, 90%, 95%, 96%, 97%, 98%, 99%, or 100% of the codons in an ORF are codons corresponding to highly expressed tRNAs (e.g., the highest-expressed tRNA for each amino acid) in a mammalian organ, such as a human organ.

[0255] Alternatively, codons corresponding to highly expressed tRNAs in an organism (e.g., human) in general may be used.

[0256] Any of the foregoing approaches to codon selection can be combined with the minimal uridine and/or adenine codons shown above, e.g., by starting with the codons of Table 1, 2, or 3, and then where more than one option is available, using the codon that corresponds to a more highly-expressed tRNA, either in the organism (e.g., human) in general, or in an organ or cell type of interest (e.g., human liver or human hepatocytes).

[0257] In some embodiments, at least 75%, 80%, 85%, 90%, 95%, 96%, 97%, 98%, 99%, or 100% of the codons in an ORF are codons from a codon set shown in Table 4 (e.g., the low U 1, low A, or low A/U codon set). The codons in the low U 1, low G, low A, and low A/U sets use codons that minimize the indicated nucleotides while also using codons corresponding to highly expressed tRNAs where more than one option is available. In some embodiments, at least 75%, 80%, 85%, 90%, 95%, 96%, 97%, 98%, 99%, or 100% of the codons in an ORF are codons from the low U 1 codon set shown in Table 4. In some embodiments, at least 75%, 80%, 85%, 90%, 95%, 96%, 97%, 98%, 99%, or 100% of the codons in an ORF are codons from the low A codon set shown in Table 4. In some embodiments, at least 75%, 80%, 85%, 90%, 95%, 96%, 97%, 98%, 99%, or 100% of the codons in an ORF are codons from the low A/U codon set shown in Table 4.

TABLE 4
Exemplary Codon Sets.

| Amino | Low U | Low U | Low | Low |
|---|---|---|---|---|
| Acid | 1 | 2 | A | A/U |
| Gly | GGC | GGG | GGC | GGC |
| Glu | GAG | GAA | GAG | GAG |
| Asp | GAC | GAC | GAC | GAC |
| Val | GTG | GTA | GTG | GTG |
| Ala | GCC | GCG | GCC | GCC |
| Arg | AGA | CGA | CGG | CGG |
| Ser | AGC | AGC | TCC | AGC |
| Lys | AAG | AAA | AAG | AAG |
| Asn | AAC | AAC | AAC | AAC |
| Met | ATG | ATG | ATG | ATG |
| Ile | ATC | ATA | ATC | ATC |
| Thr | ACC | ACG | ACC | ACC |
| Trp | TGG | TGG | TGG | TGG |
| Cys | TGC | TGC | TGC | TGC |
| Tyr | TAC | TAC | TAC | TAC |
| Leu | CTG | CTA | CTG | CTG |
| Phe | TTC | TTC | TTC | TTC |
| Gln | CAG | CAA | CAG | CAG |
| His | CAC | CAC | CAC | CAC |

[0258] 2. Heterologous Functional Domains; Nuclear Localization Signals (NLS)

[0259] In some embodiments, the polypeptide comprising a cytidine deaminase (e.g., A3A) and an RNA-guided nickase further comprises one or more additional heterologous functional domains (e.g., is or comprises a ternary or higher-order fusion polypeptide).

[0260] In some embodiments, the heterologous functional domain may facilitate transport of the polypeptide into the nucleus of a cell. For example, the heterologous functional domain may be a nuclear localization signal (NLS). In some embodiments, the polypeptide may be fused with 1-10 NLS(s). In some embodiments, the polypeptide may be fused with 1-5 NLS(s). In some embodiments, the polypeptide may be fused with one NLS. Where one NLS is used, the NLS may be fused at the N-terminus or the C-terminus of the polypeptide sequence. In some embodiments, the polypeptide may be fused C-terminally to at least one NLS. An NLS may also be inserted within the polypeptide sequence. In other embodiments, the polypeptide may be fused with more than one NLS. In some embodiments, the polypeptide may be fused with 2, 3, 4, or 5 NLSs. In some embodiments, the polypeptide may be fused with two NLSs. In certain circumstances, the two NLSs may be the same (e.g., two SV40 NLSs) or different. In some embodiments, the polypeptide is fused to two SV40 NLS sequences at the carboxy terminus. In some embodiments, the polypeptide may be fused with two NLSs, one at the N-terminus and one at the C-terminus. In some embodiments, the polypeptide may be fused with 3 NLSs. In some embodiments, the polypeptide may be fused with no NLS. In some embodiments, the NLS may be a monopartite sequence, such as, e.g., the SV40 NLS, PKKKRKV (SEQ ID NO: 63) or PKKKRRV (SEQ ID NO: 121). In some embodiments, the NLS may be a bipartite sequence, such as the NLS of nucleoplasmin, KRPAATKKAGQAKKKK (SEQ ID NO: 122). In a specific embodiment, a single PKKKRKV (SEQ ID NO: 63) NLS may be fused at the C-terminus of the polypeptide. One or more linkers are optionally included at the fusion site (e.g., between the polypeptide and NLS). In some embodiments, one or more NLS(s) according to any of the foregoing embodiments are present in the polypeptide in combination with one or more additional heterologous functional domains, such as any of the heterologous functional domains described below.

[0261] In some embodiments of the mRNA disclosed herein, the cytidine deaminase (e.g., A3A) is located N-terminal to the RNA-guided nickase in the polypeptide. In some embodiments of the mRNA disclosed herein, the encoded RNA-guided nickase comprises a nuclear localization signal (NLS). In some embodiments, the NLS is fused to the C-terminus of the RNA-guided nickase. In some embodiments, the NLS is fused to the C-terminus of the RNA-guided nickase via a linker. In some embodiments, the NLS is fused to the N-terminus of the RNA-guided nickase. In some embodiments, the NLS is fused to the N-terminus of the RNA-guided nickase via a linker (e.g., SEQ ID NO: 61). In some embodiments, the NLS comprises a sequence having at least 80%, 85%, 90%, or 95% identity to any one of SEQ ID NOs: 63 and 110-122. In some embodiments, the NLS comprises the sequence of any one of SEQ ID NOs: 63 and 110-122. In some embodiments, the NLS is encoded by a sequence having at least 80%, 85%, 90%, 95%, 98% or 100% identity to the sequence of any one of SEQ ID NOs: 63 and 110-122.

[0262] In some embodiments, the heterologous functional domain may be capable of modifying the intracellular half-life of the A3A and/or the RNA-guided nickase in the polypeptide. In some embodiments, the half-life of the A3A and/or the RNA-guided nickase in the polypeptide may be increased. In some embodiments, the half-life of the A3A and/or the RNA-guided nickase in the polypeptide may be reduced. In some embodiments, the heterologous functional domain may be capable of increasing the stability of the A3A and/or the RNA-guided nickase in the polypeptide. In some embodiments, the heterologous functional domain may be capable of reducing the stability of the A3A and/or the RNA-guided nickase in the polypeptide. In some embodiments, the heterologous functional domain may act as a signal peptide for protein degradation. In some embodiments, the protein degradation may be mediated by proteolytic enzymes, such as, for example, proteasomes, lysosomal proteases, or calpain proteases. In some embodiments, the heterologous functional domain may comprise a PEST sequence. In some embodiments, the polypeptide may be modified by addition of ubiquitin or a polyubiquitin chain. In some embodiments, the ubiquitin may be a ubiquitin-like protein (UBL). Non-limiting examples of ubiquitin-like proteins include small ubiquitin-like modifier (SUMO), ubiquitin cross-reactive protein (UCRP, also known as interferon-stimulated gene-15 (ISG15)), ubiquitin-related modifier-1 (URM1), neuronal-precursor-cell-expressed developmentally downregulated protein-8 (NEDD8, also called Rub1 in S. cerevisiae), human leukocyte antigen F-associated (FAT10), autophagy-8 (ATG8) and -12 (ATG12), Fau ubiquitin-like protein (FUB1), membrane-anchored UBL (MUB), ubiquitin fold-modifier-1 (UFM1), and ubiquitin-like protein-5 (UBL5).

[0263] In some embodiments, the heterologous functional domain may be a marker domain. Non-limiting examples of marker domains include fluorescent proteins, purification tags, epitope tags, and reporter gene sequences. In some embodiments, the marker domain may be a fluorescent protein. Any known fluorescent proteins may be used as the marker domain such as GFP, YFP, EBFP, ECFP, DsRed or any other suitable fluorescent protein. In some embodiments, the marker domain may be a purification tag and/or an epitope tag. Non-limiting exemplary tags include glutathione-S-transferase (GST), chitin binding protein (CBP), maltose binding protein (MBP), thioredoxin (TRX), poly(NANP), tandem affinity purification (TAP) tag, myc, AcV5, AU1, AU5, E, ECS, E2, FLAG, HA, nus, Softag 1, Softag 3, Strep, SBP, Glu-Glu, HSV, KT3, S, S1, T7, V5, VSV-G, 6×His, 8×His, biotin carboxyl carrier protein (BCCP), poly-His, and calmodulin. In some embodiments, the marker domain may be a reporter gene. Non-limiting exemplary reporter genes include glutathione-S-transferase (GST), horseradish peroxidase (HRP), chloramphenicol acetyltransferase (CAT), beta-galactosidase, beta-glucuronidase, luciferase, or fluorescent proteins.

[0264] In additional embodiments, the heterologous functional domain may target the polypeptide to a specific organelle, cell type, tissue, or organ. In some embodiments, the heterologous functional domain may target the polypeptide to mitochondria.

[0265] 3. UTRs; Kozak Sequences

[0266] In some embodiments, the nucleic acid (e.g., mRNA) disclosed herein comprises a 5′ UTR, 3′ UTR, or 5′ and 3′ UTRs from Hydroxysteroid 17-Beta Dehydrogenase 4 (HSD17B4 or HSD) or globin such as human alpha globin (HBA), human beta globin (HBB), Xenopus laevis beta globin (XBG), bovine growth hormone, cytomegalovirus (CMV), mouse Hba-al, heat shock protein 90 (Hsp90), glyceraldehyde 3-phosphate dehydrogenase (GAPDH), beta-actin, alpha-tubulin, tumor protein (p53), or epidermal growth factor receptor (EGFR).

[0267] In some embodiments, the nucleic acid disclosed herein comprises a 5′ UTR from HSD and a 3′ UTR from a human albumin gene. In some embodiments, an mRNA disclosed herein comprises a 5′ UTR with at least 90% identity to any one of SEQ ID NO: 93 and a 3′ UTR with at least 90% identity to any one of SEQ ID NO: 69.

[0268] In some embodiments, the nucleic acid disclosed herein comprises a 5′ UTR with at least 90% identity to any one of SEQ ID NOs: 91-98. In some embodiments, an mRNA disclosed herein comprises a 3′ UTR with at least 90% identity to any one of SEQ ID NOs: 69, 99-106. In some embodiments, any of the foregoing levels of identity is at least 95%, at least 98%, at least 99%, or 100%. In some embodiments, an mRNA disclosed herein comprises a 5′ UTR having the sequence of any one of SEQ ID NOs: 91-98. In some embodiments, an mRNA disclosed herein comprises a 3′ UTR having the sequence of any one of SEQ ID NOs: 69, 99-106. In some embodiments, the mRNA comprises a 5′ UTR and a 3′ UTR from the same source.

[0269] In some embodiments, the nucleic acid described herein does not comprise a 5′ UTR, e.g., there are no additional nucleotides between the 5′ cap and the start codon. In some embodiments, the mRNA comprises a Kozak sequence (described below) between the 5′ cap and the start codon, but does not have any additional 5′ UTR. In some embodiments, the mRNA does not comprise a 3′ UTR, e.g., there are no additional nucleotides between the stop codon and the poly-A tail.

[0270] In some embodiments, the nucleic acid herein comprises a Kozak sequence. The Kozak sequence can affect translation initiation and the overall yield of a polypeptide translated from an mRNA. A Kozak sequence includes a methionine codon that can function as the start codon. A minimal Kozak sequence is NNNRUGN wherein at least one of the following is true: the first N is A or G and the second N is G. In the context of a nucleotide sequence, R means a purine (A or G). In some embodiments, the Kozak sequence is RNNRUGN, NNNRUGG, RNNRUGG, RNNAUGN, NNNAUGG, RNNAUGG, or GCCACCAUG. In some embodiments, the Kozak sequence is rccRUGg, rccAUGg, gccAccAUG, gccRccAUGG (SEQ ID NO: 107) or gccgccRccAUGG (SEQ ID NO: 108), with zero mismatches or with up to one or two mismatches to positions in lowercase.

[0271] 4. Poly-A Tail

[0272] In some embodiments, the nucleic acid disclosed herein further comprises a poly-adenylated (poly-A) tail. The poly-A tails may comprise at least 8 consecutive adenine nucleotides, but also comprise one or more non-adenine nucleotide. As used herein, “non-adenine nucleotides” refer to any natural or non-natural nucleotides that do not comprise adenine. Guanine, thymine, and cytosine nucleotides are exemplary non-adenine nucleotides. Thus, the poly-A tails on the nucleic acid described herein may comprise consecutive adenine nucleotides located 3′ to nucleotides encoding a polypeptide of interest. In some instances, the poly-A tails on mRNA comprise non-consecutive adenine nucleotides located 3′ to nucleotides encoding a polypeptide comprising a cytidine deaminase (e.g., A3A) and an RNA-guided nickase or a sequence of interest, wherein non-adenine nucleotides interrupt the adenine nucleotides at regular or irregularly spaced intervals.

[0273] In some embodiments, the poly-A tail is encoded in the plasmid used for in vitro transcription of mRNA and becomes part of the transcript. The poly-A sequence encoded in the plasmid, i.e., the number of consecutive adenine nucleotides in the poly-A sequence, may not be exact, e.g., a 100 poly-A sequence in the plasmid may not result in a precisely 100 poly-A sequence in the transcribed mRNA. In some embodiments, the poly-A tail is not encoded in the plasmid, and is added by PCR tailing or enzymatic tailing, e.g., using E. coli poly(A) polymerase.

[0274] In some embodiments, the one or more non-adenine nucleotides are positioned to interrupt the consecutive adenine nucleotides so that a poly(A) binding protein can bind to a stretch of consecutive adenine nucleotides. In some embodiments, one or more non-adenine nucleotide(s) is located after at least 8, 9, 10, 11, or 12 consecutive adenine nucleotides. In some embodiments, the one or more non-adenine nucleotide is located after 8-50 consecutive adenine nucleotides. In some embodiments, the one or more non-adenine nucleotide is located after 8-100 consecutive adenine nucleotides.

[0275] In some embodiments, the poly-A tail comprises or contains one non-adenine nucleotide or one consecutive stretch of 2-10 non-adenine nucleotides.

[0276] In some embodiments, the non-adenine nucleotide is guanine, cytosine, or thymine. In some instances, where more than one non-adenine nucleotide is present, the non-adenine nucleotide may be selected from: a) guanine and thymine nucleotides; b) guanine and cytosine nucleotides; c) thymine and cytosine nucleotides; or d) guanine, thymine and cytosine nucleotides. An exemplary poly-A tail comprising non-adenine nucleotides is provided as SEQ ID NO: 109.

[0277] 5. Modified Nucleotides

[0278] In some embodiments, the nucleic acid disclosed herein comprises a modified uridine at some or all uridine positions. In some embodiments, the modified uridine is a uridine modified at the 5 position, e.g., with a halogen or C1-C3 alkoxy. In some embodiments, the modified uridine is a pseudouridine modified at the 1 position, e.g., with a C1-C3 alkyl. The modified uridine can be, for example, pseudouridine, N1-methyl-pseudouridine, 5-methoxyuridine, 5-iodouridine, or a combination thereof.

[0279] In some embodiments, at least 10%, 15%, 20%, 25%, 30%, 35%, 40%, 45%, 50%, 55%, 60%, 65%, 70%, 75%, 80%, 85%, 90%, 95%, 98%, 99%, or 100% of the uridine positions in the nucleic acid disclosed herein are modified uridines. In some embodiments, 10%-25%, 15-25%, 25-35%, 35-45%, 45-55%, 55-65%, 65-75%, 75-85%, 85-95%, or 90-100% of the uridine positions in an mRNA disclosed herein are modified uridines, e.g., 5-methoxyuridine, 5-iodouridine, N1-methyl pseudouridine, pseudouridine, or a combination thereof.

[0280] In some embodiments, at least 10% of the uridine is substituted with a modified uridine. In some embodiments, 15% to 45% of the uridine is substituted with the modified uridine. In some embodiments, at least 20%, at least 30%, at least 40%, at least 50%, at least 60%, at least 70%, at least 80%, at least 90%, or 100% of the uridine is substituted with the modified uridine.

[0281] 6. 5′ Cap

[0282] In some embodiments, the nucleic acid disclosed herein comprises a 5′ cap, such as a Cap0, Cap1, or Cap2. A 5′ cap is generally a 7-methylguanine ribonucleotide (which may be further modified, as discussed below e.g., with respect to ARCA) linked through a 5′-triphosphate to the 5′ position of the first nucleotide of the 5′-to-3′ chain of the nucleic acid, i.e., the first cap-proximal nucleotide. In Cap0, the riboses of the first and second cap-proximal nucleotides of the mRNA both comprise a 2′-hydroxyl. In Cap1, the riboses of the first and second transcribed nucleotides of the mRNA comprise a 2′-methoxy and a 2′-hydroxyl, respectively. In Cap2, the riboses of the first and second cap-proximal nucleotides of the mRNA both comprise a 2′-methoxy. See, e.g., Katibah et al. (2014) Proc Natl Acad Sci USA 111(33):12025-30; Abbas et al. (2017) Proc Natl Acad Sci USA 114(11):E2106-E2115. Most endogenous higher eukaryotic nucleic acids, including mammalian nucleic acids such as human nucleic acids, comprise Cap1 or Cap2. Cap0 and other cap structures differing from Cap1 and Cap2 may be immunogenic in mammals, such as humans, due to recognition as “non-self” by components of the innate immune system such as IFIT-1 and IFIT-5, which can result in elevated cytokine levels including type I interferon. Components of the innate immune system such as IFIT-1 and IFIT-5 may also compete with eIF4E for binding of a nucleic acids with a cap other than Cap1 or Cap2, potentially inhibiting translation of the nucleic acid.

[0283] A cap can be included co-transcriptionally. For example, ARCA (anti-reverse cap analog; Thermo Fisher Scientific Cat. No. AM8045) is a cap analog comprising a 7-methylguanine 3′-methoxy-5′-triphosphate linked to the 5′ position of a guanine ribonucleotide which can be incorporated in vitro into a transcript at initiation. ARCA results in a Cap0 cap or a Cap0-like cap in which the 2′ position of the first cap-proximal nucleotide is hydroxyl. See, e.g., Stepinski et al., (2001) “Synthesis and properties of mRNAs containing the novel ‘anti-reverse’ cap analogs 7-methyl(3′-O-methyl)GpppG and 7-methyl(3′deoxy)GpppG,” RNA 7: 1486-1495. The ARCA structure is shown below.

[chemical structure]

[0284] CleanCap™ AG (m7G(5′)ppp(5′)(2′OMeA)pG; TriLink Biotechnologies Cat. No. N-7113) or CleanCap™ GG (m7G(5′)ppp(5′)(2′OMeG)pG; TriLink Biotechnologies Cat. No. N-7133) can be used to provide a Cap1 structure co-transcriptionally. 3′-O-methylated versions of CleanCap™ AG and CleanCap™ GG are also available from TriLink Biotechnologies as Cat. Nos. N-7413 and N-7433, respectively. The CleanCap™ AG structure is shown below. CleanCap™ structures are sometimes referred to herein using the last three digits of the catalog numbers listed above (e.g., “CleanCap™ 113” for TriLink Biotechnologies Cat. No. N-7113).

[chemical structure]

[0285] Alternatively, a cap can be added to an RNA post-transcriptionally. For example, Vaccinia capping enzyme is commercially available (New England Biolabs Cat. No. M2080S) and has RNA triphosphatase and guanylyltransferase activities, provided by its D1 subunit, and guanine methyltransferase, provided by its D12 subunit. As such, it can add a 7-methylguanine to an RNA, so as to give Cap0, in the presence of S-adenosyl methionine and GTP. See, e.g., Guo, P. and Moss, B. (1990) Proc. Natl. Acad. Sci. USA 87, 4023-4027; Mao, X. and Shuman, S. (1994) J. Biol. Chem. 269, 24472-24479. For additional discussion of caps and capping approaches, see, e.g., WO2017/053297 and Ishikawa et al., Nucl. Acids. Symp. Ser. (2009) No. 53, 129-130.

[0286] G. Guide RNA (gRNA)

[0287] In some embodiments, the compositions comprise at least one guide RNA (gRNA), and the methods comprise delivering at least one gRNA, wherein the gRNA directs the editor to a desired genomic location. In some embodiments, a composition comprises an mRNA described herein and at least one gRNA. In some embodiments, a composition comprises a polypeptide described herein and at least one gRNA. In some embodiments, the gRNA is a single guide RNA (sgRNA). In some embodiments, the gRNA is a dual guide RNA (dgRNA).

[0288] A gRNA disclosed herein may comprise a guide sequence that directs a polypeptide comprising a cytidine deaminase (e.g., an APOBEC3A deaminase) and an RNA-guided nickase to a cytosine (C) located in any region of a gene (e.g., within the coding region of a gene) for cytosine (C) to thymine (T) conversion (“C-to-T conversion”).

[0289] In some embodiments, the C-to-T conversion alters a DNA sequence, such as a human genetic sequence. In some embodiments, the C-to-T conversion alters the coding sequence of a gene. In some embodiments, the C-to-T conversion generates a stop codon, for example, a premature stop codon within the coding region of a gene. In some embodiments, the C-to-T conversion eliminates a stop codon. In some embodiments, the C-to-T conversion alters the regulatory sequence of a gene (e.g., a gene promotor or gene repressor). In some embodiments, the C-to-T conversion alters the splicing of a gene. In some embodiments, the C-to-T conversion corrects a genetic defect associated with a disease or disorder.

[0290] In some embodiments, a guide RNA (gRNA) comprises a guide sequence that directs a polypeptide comprising a cytidine deaminase (e.g., an APOBEC3A deaminase) and an RNA-guided nickase to a splice donor or acceptor site in a gene. In some embodiments, the splice donor or acceptor is a splice donor site. In some embodiments, the splice donor or acceptor site is a splice acceptor site.

[0291] In some embodiments, a guide RNA (gRNA) comprises a guide sequence that directs a polypeptide comprising a cytidine deaminase (e.g., an APOBEC3A deaminase) and an RNA-guided nickase to an acceptor splice site boundary. In some embodiments, a guide RNA (gRNA) comprises a guide sequence that directs a polypeptide comprising a cytidine deaminase (e.g., A3A) and an RNA-guided nickase to a donor splice site boundary.

[0292] In some embodiments, a guide RNA (gRNA) comprises a guide sequence that directs a polypeptide comprising a cytidine deaminase (e.g., an APOBEC3A deaminase) and an RNA-guided nickase to make a single-strand cut in a gene at a cut site 3′ of an acceptor splice site boundary or 5′ of an acceptor splice site boundary. In this and the following discussion, 3′ and 5′ indicate directions in the sense of the strand being cut.

[0293] In some embodiments, a guide RNA (gRNA) disclosed herein comprises a guide sequence that directs a polypeptide comprising a cytidine deaminase (e.g., an APOBEC3A deaminase) and an RNA-guided nickase for making a single-strand cut in a gene at a cut site that is 3′ of a donor splice site boundary or 5′ of a donor splice site boundary.

[0294] A “splice site,” as used herein, refers to the three nucleotides that make up an acceptor splice site or a donor splice site (defined below), or any other nucleotides known in the art that are part of a splice site. See e.g., Burset et al., Nucleic Acids Research 28(21):4364-4375 (2000) (describing canonical and non-canonical splice sites in mammalian genomes). The three nucleotides that make up an “acceptor splice site” are two conserved residues (e.g., AG in humans) at the 3′ of an intron and a boundary nucleotide (i.e., the first nucleotide of the exon 3′ of the AG). The three nucleotides that make up a “donor splice site” are two conserved residues (e.g., GT (gene) or GU (in RNA such as pre-mRNA) in human) at the 5′ end of an intron and a boundary nucleotide (i.e., the first nucleotide of the exon 5′ of the GT).

[0295] In some embodiments, a composition comprising at least one gRNA is provided in combination with a nucleic acid (e.g., an mRNA) disclosed herein. In some embodiments, one or more gRNA is provided as a separate molecule from the nucleic acid (e.g., an mRNA) disclosed herein. In some embodiments, a gRNA is provided as a part, such as a part of a UTR, of the nucleic acid disclosed herein.

[0296] In some embodiments, a composition is provided comprising a polypeptide comprising a cytidine deaminase and an RNA-guided nickase, and a gRNA. In some embodiments, a ribonucleoprotein complex (RNP) is provided, the RNP comprising a polypeptide comprising a cytidine deaminase and an RNA-guided nickase and a gRNA. In some embodiments, the polypeptide does not comprise a UGI.

[0297] The gRNA comprises a guide sequence targeting a particular gene or genetic sequence. In some embodiments, the gRNA is a Cas nickase guide. In some embodiments, the gRNA is a Class 2 Cas nickase guide. In further embodiments, the gRNA is a Cpf1 or Cas9 guide. In some embodiments, the gRNA is a Nme nickase guide. In some embodiments, the Nme nickase is a Nme1, Nme2, or Nme3 nickase. In some embodiments, the gRNA comprises a guide sequence 5′ of an RNA that forms two or more hairpin or stem-loop structures. CRISPR/Cas gRNA structures are known in the art and vary with their cognate Cas nuclease. In general, the gRNA used together with any particular Cas9 or Nme nickase described herein must function with that nickase. For example, when the polypeptide disclosed herein comprises a SpyCas9 nickase, the gRNA provided is a SpyCas9 guide RNA (as described herein). When the polypeptide disclosed herein comprises a NmeCas9 nickase, the guide RNA is a NmeCas9 guide RNA (as described herein).

[0298] In some embodiments, the gRNA comprises a guide sequence that direct an RNA-guided nickase (e.g., Cas9 nickase), to a target DNA sequence in a target locus, such as a target gene. Targets and exemplary target sequences targeting each gene are exemplified herein and include, but are not limited to, targets and guide sequences disclosed in e.g., WO2017185054 (for trinucleotide repeats in transcription factor four (TCF4)); WO 2018119182 A1 (targeting SERPINA1); WO 2019/067872 (targeting transthyretin (7TR); WO 2020/028327 A1 (targeting hydroxyacid oxidase 1 (HA01), the contents of each of which are hereby incorporated by reference in their entirety. One skilled in the art will be familiar with suitable guide sequences for targeting other genes or loci of interest.

[0299] The gRNA may comprise a crRNA comprising 17, 18, 19, 20, 21, 22, 23, 24, or 25 contiguous nucleotides of a guide sequence. The gRNA may further comprise a trRNA. In each composition and method embodiment described herein, the crRNA and trRNA may be associated as a single RNA (sgRNA), or may be on separate RNAs (dgRNA). In the context of sgRNAs, the crRNA and trRNA components may be covalently linked, e.g., via a phosphodiester bond or other covalent bond.

[0300] In each of the composition, use, and method embodiments described herein, the gRNA may comprise two RNA molecules as a “dual guide RNA” or “dgRNA”. The dgRNA comprises a first RNA molecule comprising a crRNA comprising a guide sequence, and a second RNA molecule comprising a trRNA. The first and second RNA molecules may not be covalently linked, but may form a RNA duplex via the base pairing between portions of the crRNA and the trRNA.

[0301] In each of the composition, use, and method embodiments described herein, the gRNA may comprise a single RNA molecule as a “single guide RNA” or “sgRNA”. The sgRNA may comprise a crRNA (or a portion thereof) comprising a guide sequence covalently linked to, e.g., a trRNA. The sgRNA may comprise 17, 18, 19, 20, 21, 22, 23, 24, or 25 contiguous nucleotides of a guide sequence. In some embodiments, the crRNA and the trRNA are covalently linked via a linker. In some embodiments, the sgRNA forms a stem-loop structure via the base pairing between portions of the crRNA and the trRNA. In some embodiments, the crRNA and the trRNA are covalently linked via one or more bonds that are not a phosphodiester bond.

[0302] In some embodiments, the trRNA may comprise all or a portion of a trRNA sequence derived from a naturally-occurring CRISPR/Cas system. In some embodiments, the trRNA comprises a truncated or modified wild type trRNA. The length of the trRNA depends on the CRISPR/Cas system used. In some embodiments, the trRNA comprises or consists of 5, 6, 7, 8, 9, 10, 11, 12, 13, 14, 15, 16, 17, 18, 19, 20, 25, 30, 40, 50, 60, 70, 80, 90, 100, or more than 100 nucleotides. In some embodiments, the trRNA may comprise certain secondary structures, such as, for example, one or more hairpin or stem-loop structures, or one or more bulge structures.

[0303] The gRNAs provided herein can be useful for recognizing (e.g., hybridizing to) a target sequence in the gene. In some embodiments, the selection of the one or more gRNAs is determined based on target sequences within the gene. In some embodiments, a gRNA complementary or having complementarity to a target sequence within the target locus is used to direct a polypeptide comprising a cytidine deaminase (e.g., A3A) and an RNA-guided nickase to a particular location in the locus. The target locus may be recognized and nicked by a Cas nickase comprising a gRNA.

[0304] In some embodiments, the guide sequence is at least 99%, 98%, 97%, 96%, 95%, 94%, 93%, 92%, 91%, or 90% identical to a target sequence. In some embodiments, the target sequence may be complementary to the guide sequence of the gRNA. In some embodiments, the degree of complementarity or identity between a guide sequence of a gRNA and its corresponding target sequence may be about 50%, 55%, 60%, 65%, 70%, 75%, 80%, 85%, 90%, 95%, 96%, 97%, 98%, 99%, or 100%. In some embodiments, the target sequence and the guide sequence of the gRNA may be 100% complementary or identical. In other embodiments, the target sequence and the guide sequence of the gRNA may contain at least one mismatch. For example, the target sequence and the guide sequence of the gRNA may contain 1, 2, 3, 4, 5, 6, 7, 8, 9, or 10 mismatches, where the total length of the target sequence is at least about 17, 18, 19, 20 or more base pairs. In some embodiments, the target sequence and the guide sequence of the gRNA may contain 1, 2, 3, 4, 5, or 6 mismatches where the guide sequence is 20 nucleotides.

[0305] The gRNA may comprise a guide sequence linked to additional nucleotides to form a crRNA, e.g., with the following exemplary nucleotide sequence following the guide sequence at its 3′ end: GUUUUAGAGCUAUGCUGUUUUG (SEQ ID NO: 139).

[0306] In the case of an sgRNA, the guide sequence may be linked to additional nucleotides to form a sgRNA, e.g., with the following exemplary nucleotide sequence following the 3′ end of the guide sequence: GUUUUAGAGCUAGAAAUAGCAAGUUAAAAUAAGGCUAGUCCGUUAUCAACUU GAAAAAGUGGCACCGAGUCGGUGCUUUU (SEQ ID NO: 140) in 5′ to 3′ orientation.

[0307] In some embodiments, the sgRNA comprises the modification pattern shown below in SEQ ID NO: 141, where N is any natural or non-natural nucleotide, and where the totality of the N's comprise a guide sequence as described herein and the modified sgRNA comprises the following sequence: mN*mN*mN*NNNNNNNNNNNNNNNNNGUUUUAGAmGmCmUmAmGmAmAmAmU mAmGmCAAGUUAAAAUAAGGCUAGUCCGUUAUCAmAmCmUmUmGmAmAmAm AmAmGmUmGmGmCmAmCmCmGmAmGmUmCmGmGmUmGmCmU*mU*mU*mU (SEQ ID NO: 141), where “N” may be any natural or non-natural nucleotide. For example, encompassed herein is SEQ ID NO: 141, where the N's are replaced with any of the guide sequences disclosed herein. The modifications remain as shown in SEQ ID NO: 141 despite the substitution of N's for the nucleotides of a guide. That is, although the nucleotides of the guide replace the “N's”, the first three nucleotides are 2′OMe modified and there are phosphorothioate linkages between the first and second nucleotides, the second and third nucleotides and the third and fourth nucleotides.

[0308] FIG. 23A shows an exemplary sgRNA (SEQ ID NO: 141, methylation not shown) in a possible secondary structure with labels designating individual nucleotides of the conserved region of the sgRNA, including the lower stem, bulge, upper stem, nexus (the nucleotides of which can be referred to as N1 through N18, respectively, in the 5′ to 3′ direction), and the hairpin region which includes hairpin 1 and hairpin 2 regions. A nucleotide between hairpin 1 and hairpin 2 is labeled n. A guide region may be present on an sgRNA and is indicated in this figure as “(N)x” preceding the conserved region of the sgRNA. In some embodiments, the sgRNA may further comprise one or more nucleotides between the lower stem and bulge regions, between the bulge and the upper stem region, between the upper stem and the nexus, or the between the nexus and the hairpin 1 region or between the hairpin 1 and hairpin 2 regions.

[0309] In some embodiments, a conserved portion of the sgRNA is a conserved region of a spyCas9 or a spyCas9 equivalent. In some embodiments, a conserved portion of the sgRNA is not from S. pyogenes Cas9, such as Staphylococcus aureus Cas9 (“saCas9”). Further description of regions of exemplary sgRNAs are provided in WO2019/237069 published Dec. 12, 2019, the entire contents of which are incorporated herein by reference.

[0310] The SpyCas9 gRNA may comprise internal linkers. In some embodiments, the internal linker may have a bridging length of about 3-30, optionally 12-21 atoms, and the linker substitutes for at least 2 nucleotides of the gRNA. In some embodiments, the internal linker has a bridging length of about 6-18 atoms, optionally about 6-12 atoms, and the linker substitutes for at least 2 nucleotides of the gRNA.

[0311] In some embodiments the internal linker comprises at least two ethylene glycol subunits covalently linked to each other. In some embodiments, the internal linker comprises a PEG-linker.

[0312] In some embodiments, the internal linker comprises a PEG-linker having from 1 to 10 ethylene glycol units. In some embodiments, the internal linker comprises a PEG-linker having from 3 to 6 ethylene glycol units. In some embodiments, the internal linker comprises a PEG-linker having 3 ethylene glycol units. In some embodiments, the internal linker comprises a PEG-linker having 6 ethylene glycol units.

[0313] In some embodiments, the conserved portion of a spyCas9 guide RNA comprises a repeat-anti-repeat region, a hairpin 1 region, and a hairpin 2 region, and further comprises at least one of:
[0314] 1) a first internal linker substituting for at least 2 nucleotides of an upper stem region of the repeat-anti-repeat region of the sgRNA;
[0315] 2) a second internal linker substituting for 1 or 2 nucleotides of the hairpin 1 of the sgRNA; or
[0316] 3) a third internal linker substituting for at least 2 nucleotides of the hairpin 2 of the sgRNA.

[0317] Exemplary locations of the linkers in the spyCas9 guide RNA are as shown in the following: NNNNNNNNNNNNNNNNNNNNGUUUUAGAGCUA(L1)UAGCAAGUUAAAAUAAG GCUAGUCCGUUAUCAACUU(L1)AAGUGGCACCGAGUCGGUGCUUUUU (SEQ ID NO: 524) where N are nucleotides encoding a guide sequence.

[0318] As used herein, “Linker 1” or “L1” refers to an internal linker having a bridging length of about 15-21 atoms. As used herein, “Linker 2” or “L2” refers to an internal linker having a bridging length of about 6-12 atoms.

[0319] In some embodiments, the spyCas9 guide RNA comprising internal linkers may be chemically modified. Exemplary modifications include a modification pattern of the following sequence:

(SEQ ID NO: 523)
mA*mC*mG*CAAAUAUCAGUCCAGCGGUUUUAGAmGmCmUmA(L1)mUm
AmGmCAAGUUAAAAUAAGGC(L2)GUCCGUUAUCAC(L1)GGGCACCGA
GUCGG*mU*mG*mC

[0320] In some embodiments, the gRNA comprises a 3′ tail. In some embodiments, the 3′ tail consists of a nucleotide comprising a uracil or modified uracil. In some embodiments, the 3′ terminal nucleotide is a modified nucleotide. In some embodiments, wherein the 3′ tail comprises a modification of any one or more of the nucleotides present in the 3′ tail. In further embodiments, wherein the modification of the 3′ tail is one or more of 2′-O-methyl (2′-OMe) modified nucleotide and a phosphorothioate (PS) linkage between nucleotides. penultimate nucleotide.

[0321] 1. Short-Single Guide RNA (Short-sgRNA)

[0322] In some embodiments, an sgRNA provided herein is a short-single guide RNAs (short-sgRNAs), e.g., comprising a conserved portion of an sgRNA comprising a hairpin region, wherein the hairpin region lacks at least 5-10 nucleotides or 6-10 nucleotides. In some embodiments, the 5-10 nucleotides or 6-10 nucleotides are consecutive.

[0323] In some embodiments, a short-sgRNA lacks at least nucleotides 54-58 (AAAAA) of the conserved portion of a spyCas9 sgRNA. In some embodiments, a short-sgRNA is a non-spyCas9 sgRNA that lacks nucleotides corresponding to nucleotides 54-58 (AAAAA) of the conserved portion of a spyCas9 as determined, for example, by pairwise or structural alignment.

[0324] Structural alignment is useful where molecules share similar structures despite considerable sequence variation. Structural alignment involves identifying corresponding residues across two (or more) sequences by (i) modeling the structure of a first sequence using the known structure of the second sequence or (ii) comparing the structures of the first and second sequences where both are known, and identifying the residue in the first sequence most similarly positioned to a residue of interest in the second sequence. Corresponding residues are identified in some algorithms based on distance minimization given position (e.g., nucleobase position 1 or the 1′ carbon of the pentose ring for polynucleotides, or alpha carbons for polypeptides) in the overlaid structures (e.g., what set of paired positions provides a minimized root-mean-square deviation for the alignment). When identifying positions in a non-spyCas9 gRNA corresponding to positions described with respect to spyCas9 gRNA, spyCas9 gRNA can be the “second” sequence. Where a non-spyCas9 gRNA of interest does not have an available known structure, but is more closely related to another non-spyCas9 gRNA that does have a known structure, it may be most effective to model the non-spyCas9 gRNA of interest using the known structure of the closely related non-spyCas9 gRNA, and then compare that model to the spyCas9 gRNA structure to identify the desired corresponding residue in the non-spyCas9 gRNA of interest. There is an extensive literature on structural modeling and alignment for proteins; representative disclosures include U.S. Pat. Nos. 6,859,736; 8,738,343; and those cited in Aslam et al., Electronic Journal of Biotechnology 20 (2016) 9-13. For discussion of modeling a structure based on a known related structure or structures, see, e.g., Bordoli et al., Nature Protocols 4 (2009) 1-13, and references cited therein. See also FIG. 2(F) from Nishimasu et al., Cell 162(5): 1113-1126 (2015) for alignment of nucleic acid.

[0325] In some embodiments, the short-sgRNA described herein comprises a conserved portion comprising a hairpin region, wherein the hairpin region lacks 5, 6, 7, 8, 9, 10, 11, or 12 nucleotides. In some embodiments, the lacking nucleotides are 5-10 lacking nucleotides or 6-10 lacking nucleotides. In some embodiments, the lacking nucleotides are consecutive. In some embodiments, the lacking nucleotides span at least a portion of hairpin 1 and a portion of hairpin 2. In some embodiments, the 5-10 lacking nucleotides comprise or consist of nucleotides 54-58, 54-61, or 53-60 of SEQ ID NO: 140.

[0326] In some embodiments, the short-sgRNA described herein further comprises a nexus region, wherein the nexus region lacks at least one nucleotide (e.g., 1, 2, 3, 4, 5, 6, 7, 8, 9, or 10 nucleotides in the nexus region). In some embodiments, the short-sgRNA lacks each nucleotide in the nexus region.

[0327] In some embodiments, the SpyCas9 short-sgRNA described herein comprises a sequence of NNNNNNNNNNNNNNNNNNNNGUUUUAGAGCUAGAAAUAGCAAGUUAAAAUAA GGCUAGUCCGUUAUCACGAAAGGGCACCGAGUCGGUGCU (SEQ ID NO: 521). In some embodiments, the short-sgRNA described herein comprises a modification pattern as shown in SEQ ID NO: 520: mN*mN*mN*GUUUUAGAmGmCmUmAmGmAmAmAmUmAmGmCAAGUUAAAAUA AGGCUAGUCCGUUAUCACGAAAGGGCACCGAGUCGGmUmGmC*mU (SEQ ID NO: 520), where A, C, G, U, and N are adenine, cytosine, guanine, uracil, and any ribonucleotide, respectively, unless otherwise indicated. An m is indicative of a 2′O-methyl modification, and an * is indicative of a phosphorothioate linkage between the nucleotides.

[0328] In some embodiments, a gRNA described herein is an N. meningitidis Cas9 (NmeCas9) gRNA comprising a conserved portion comprising a repeat/anti-repeat region, a hairpin 1 region, and a hairpin 2 region, wherein one or more of the repeat/anti-repeat region, the hairpin 1 region, and the hairpin 2 region are shortened. Exemplary wild-type NmeCas9 guide RNA comprises a sequence of (N)₂₀₋₂₅ GUUGUAGCUCCCUUUCUCAUUUCGGAAACGAAAUGAGAACCGUUGCUACAAU AAGGCCGUCUGAAAAGAUGUGCCGCAACGCUCUGCCCCUUAAAGCUUCUGCUU UAAGGGGCAUCGUUUA (SEQ ID NO: 512). (N)₂₀-25 as used herein represent 20-25, i.e., 20, 21, 22, 23, 24, or 25 consecutive N. A, C, G, and U represent nucleotides having adenine, cytosine, guanine, and uracil bases, respectively. In some embodiments, (N)₂₀₋₂₅ has 24 nucleotides in length. N is any natural or non-natural nucleotide, and where the totality of the N's comprises a guide sequence.

[0329] In some embodiments, the conserved portion of the NmeCas9 short-gRNA comprises:
[0330] (a) a shortened repeat/anti-repeat region, wherein the shortened repeat/anti-repeat region lacks 2-24 nucleotides, wherein
   [0331] (i) one or more of nucleotides 37-48 and 53-64 is deleted and optionally one or more of nucleotides 37-64 is substituted relative to SEQ ID NO: 512; and
   [0332] (ii) nucleotide 36 is linked to nucleotide 65 by at least 2 nucleotides; or
[0333] b) a shortened hairpin 1 region, wherein the shortened hairpin 1 lacks 2-10, optionally 2-8 nucleotides, wherein
   [0334] (i) one or more of nucleotides 82-86 and 91-95 is deleted and optionally one or more of positions 82-96 is substituted relative to SEQ ID NO: 512 and
   [0335] (ii) nucleotide 81 is linked to nucleotide 96 by at least 4 nucleotides; or
[0336] (c) a shortened hairpin 2 region, wherein the shortened hairpin 2 lacks 2-18, optionally 2-16 nucleotides, wherein
   [0337] (i) one or more of nucleotides 113-121 and 126-134 is deleted and optionally one or more of nucleotides 113-134 is substituted relative to SEQ ID NO: 512; and
   [0338] (ii) nucleotide 112 is linked to nucleotide 135 by at least 4 nucleotides; wherein one or both nucleotides 144-145 are optionally deleted relative to SEQ ID NO: 512; and wherein at least 10 nucleotides are modified nucleotides.

[0339] In some embodiments, the NmeCas9 short-gRNA comprises one of the following sequences in 5′ to 3′ orientation:

(SEQ ID NO: 513)
(N)₂₀₋₂₅GUUGUAGCUCCCUGAAACCGUUGCUACAAUAAGGCCGUCGAAA
GAUGUGCCGCAACGCUCUGCCUUCUGGCAUCGUU;
(SEQ ID NO: 514)
(N)₂₀₋₂₅GUUGUAGCUCCCUGAAACCGUUGCUACAAUAAGGCCGUCGAAA
GAUGUGCCGCAACGCUCUGCCUUCUGGCAUCGUUUAUU;
(SEQ ID NO: 515)
(N)₂₀₋₂₅GUUGUAGCUCCCUGGAAACCCGUUGCUACAAUAAGGCCGUCGA
AAGAUGUGCCGCAACGCUCUGCCUUCUGGCAUCGUUUAUU

[0340] In some embodiments, at least 10 nucleotides of the conserved portion of the NmeCas9 short-sgRNA are modified nucleotides.

[0341] In some embodiments, the NmeCas9 short-sgRNA comprises a conserved region comprising one of the following sequences in 5′ to 3′ orientation: GUUGmUmAmGmCUCCCmUmGmAmAmAmCmCGUUmGmCUAmCAAU*AAGmGm CCmGmUmCmGmAmAmAmGmAmUGUGCmCGCmAmAmCmGCUCUmGmCCmUmU mCmUGmGCmAmUC*mG*mU*mU (SEQ ID NO: 516); or GUUGmUmAmGmCUCCCmUmGmAmAmAmCmCGUUmGmCUAmCAAU*AAGmGm CCmGmUmCmGmAmAmAmGmAmUGUGCmCGmCAAmCGCUCUmGmCCmUmUmC mUGGCAUCG*mU*mU (SEQ ID NO: 517).

[0342] The shortened NmeCas9 gRNA may comprise internal linkers disclosed herein.

[0343] “Internal linker” as used herein describes a non-nucleotide segment joining two nucleotides within a guide RNA. If the gRNA contains a spacer region, the internal linker is located outside of the spacer region (e.g., in the scaffold or conserved region of the gRNA). For Type V guides, it is understood that the last hairpin is the only hairpin in the structure, i.e., the repeat-anti-repeat region. In some embodiments, the internal linker comprises a PEG-linker disclosed herein.

[0344] Exemplary locations of the linkers are as shown in the following: (N)₂₀₋₂₅ GUUGUAGCUCCCUUC(L1)GACCGUUGCUACAAUAAGGCCGUC(L1)GAUGU GCCGCAACGCUCUGCC(L1)GGCAUCGUU (SEQ ID NO: 518). As used herein, (L1) refers to an internal linker having a bridging length of about 15-21 atoms.

[0345] In some embodiments, the shortened NmeCas9 guide RNA comprising internal linkers may be chemically modified. Exemplary modifications include a modification pattern of the following sequence: mN*mN*mN*mNmNNNmNmNNmNNmNNNNNmNNNNmNNNmGUUGmUmAmGmC UCCCmUmUmC(L1)mGmAmCmCGUUmGmCUAmCAAU*AAGmGmCCmGmUmC(L1) mGmAmUGUGCmCGmCAAmCGCUCUmGmCC(L1)GGCAUCG*mU*mU (SEQ ID NO: 519).

[0346] 2. Modifications

[0347] In some embodiments, the gRNA (e.g., sgRNA, short-sgRNA, dgRNA, or crRNA) is modified. The term “modified” or “modification” in the context of a gRNA described herein includes, the modifications described above, including, for example, (a) end modifications, e.g., 5′ end modifications or 3′ end modifications, including 5′ or 3′ protective end modifications, (b) nucleobase (or “base”) modifications, including replacement or removal of bases, (c) sugar modifications, including modifications at the 2′, 3′, and/or 4′ positions, (d) internucleoside linkage modifications, and (e) backbone modifications, which can include modification or replacement of the phosphodiester linkages and/or the ribose sugar. A modification of a nucleotide at a given position includes a modification or replacement of the phosphodiester linkage immediately 3′ of the sugar of the nucleotide. Thus, for example, a nucleic acid comprising a phosphorothioate between the first and second sugars from the 5′ end is considered to comprise a modification at position 1. The term “modified gRNA” generally refers to a gRNA having a modification to the chemical structure of one or more of the base, the sugar, and the phosphodiester linkage or backbone portions, including nucleotide phosphates, all as detailed and exemplified herein (see the modification patterns shown in e.g., SEQ ID NOs: 142-145, 181-185 and 191-203).

[0348] Further description and exemplary patterns of modifications are provided in in Table 1 of WO2019/237069 published Dec. 12, 2019, the entire contents of which are incorporated herein by reference.

[0349] In some embodiments, a gRNA comprises modifications at 1, 2, 3, 4, 5, 6, 7, 8, 9, 10, 11, 12, 13, 14, 15, 16, or more YA sites. In some embodiments, the pyrimidine of the YA site comprises a modification (which includes a modification altering the internucleoside linkage immediately 3′ of the sugar of the pyrimidine). In some embodiments, the adenine of the YA site comprises a modification (which includes a modification altering the internucleoside linkage immediately 3′ of the sugar of the adenine). In some embodiments, the pyrimidine and the adenine of the YA site comprise modifications, such as sugar, base, or internucleoside linkage modifications. The YA modifications can be any of the types of modifications set forth herein. In some embodiments, the YA modifications comprise one or more of phosphorothioate, 2′-OMe, or 2′-fluoro. In some embodiments, the YA modifications comprise pyrimidine modifications comprising one or more of phosphorothioate, 2′-OMe, 2′-H, inosine, or 2′-fluoro. In some embodiments, the YA modification comprises a bicyclic ribose analog (e.g., an LNA, BNA, or ENA) within an RNA duplex region that contains one or more YA sites. In some embodiments, the YA modification comprises a bicyclic ribose analog (e.g., an LNA, BNA, or ENA) within an RNA duplex region that contains a YA site, wherein the YA modification is distal to the YA site.

[0350] In some embodiments, the guide sequence (or guide region) of a gRNA comprises 1, 2, 3, 4, 5, or more YA sites (“guide region YA sites”) that may comprise YA modifications. In some embodiments, one or more YA sites located at 5-end, 6-end, 7-end, 8-end, 9-end, or 10-end from the 5′ end of the 5′ terminus (where “5-end”, etc., refers to position 5 to the 3′ end of the guide region, i.e., the most 3′ nucleotide in the guide region) comprise YA modifications. A modified guide region YA site comprises a YA modification.

[0351] In some embodiments, a modified guide region YA site is within 20, 19, 18, 17, 16, 15, 14, 13, 12, 11, 10, or 9 nucleotides of the 3′ terminal nucleotide of the guide region. For example, if a modified guide region YA site is within 10 nucleotides of the 3′ terminal nucleotide of the guide region and the guide region is 20 nucleotides long, then the modified nucleotide of the modified guide region YA site is located at any of positions 11-20. In some embodiments, a modified guide region YA site is at or after nucleotide 4, 5, 6, 7, 8, 9, 10, or 11 from the 5′ end of the 5′ terminus.

[0352] In some embodiments, a modified guide region YA site is other than a 5′ end modification. For example, a sgRNA can comprise a 5′ end modification as described herein and further comprise a modified guide region YA site. Alternatively, a sgRNA can comprise an unmodified 5′ end and a modified guide region YA site. Alternatively, a short-sgRNA can comprise a modified 5′ end and an unmodified guide region YA site.

[0353] In some embodiments, a modified guide region YA site comprises a modification that at least one nucleotide located 5′ of the guide region YA site does not comprise. For example, if nucleotides 1-3 comprise phosphorothioates, nucleotide 4 comprises only a 2′-OMe modification, and nucleotide 5 is the pyrimidine of a YA site and comprises a phosphorothioate, then the modified guide region YA site comprises a modification (phosphorothioate) that at least one nucleotide located 5′ of the guide region YA site (nucleotide 4) does not comprise. In another example, if nucleotides 1-3 comprise phosphorothioates, and nucleotide 4 is the pyrimidine of a YA site and comprises a 2′-OMe, then the modified guide region YA site comprises a modification (2′-OMe) that at least one nucleotide located 5′ of the guide region YA site (any of nucleotides 1-3) does not comprise. This condition is also always satisfied if an unmodified nucleotide is located 5′ of the modified guide region YA site.

[0354] In some embodiments, the modified guide region YA sites comprise modifications as described for YA sites above. The guide region of a gRNA may be modified according to any embodiment comprising a modified guide region set forth herein.

[0355] Conserved region YA sites 1-10 are illustrated in FIG. 23B. In some embodiments, 1, 2, 3, 4, 5, 6, 7, 8, 9, or 10 conserved region YA sites comprise modifications. In some embodiments, conserved region YA sites 1, 8, or 1 and 8 comprise YA modifications. In some embodiments, conserved region YA sites 1, 2, 3, 4, and 10 comprise YA modifications. In some embodiments, YA sites 2, 3, 4, 8, and 10 comprise YA modifications. In some embodiments, conserved region YA sites 1, 2, 3, and 10 comprise YA modifications. In some embodiments, YA sites 2, 3, 8, and 10 comprise YA modifications. In some embodiments, YA sites 1, 2, 3, 4, 8, and 10 comprise YA modifications. In some embodiments, 1, 2, 3, 4, 5, 6, 7, or 8 additional conserved region YA sites comprise YA modifications.

[0356] In some embodiments, the modified conserved region YA sites comprise modifications as described for YA sites above. Any embodiments set forth elsewhere in this disclosure may be combined to the extent feasible with any of the foregoing embodiments.

[0357] In some embodiments, the 5′ and/or 3′ terminus regions of a gRNA are modified.

[0358] In some embodiments, the terminal (i.e., last) 1, 2, 3, 4, 5, 6, or 7 nucleotides in the 3′ terminus region are modified. Throughout, this modification may be referred to as a “3′ end modification”. In some embodiments, the terminal (i.e., last) 1, 2, 3, 4, 5, 6, or 7 nucleotides in the 3′ terminus region comprise more than one modification. In some embodiments, the 3′ end modification comprises or further comprises any one or more of the following: a modified nucleotide selected from 2′-O-methyl (2′-O-Me) modified nucleotide, 2′-O-(2-methoxyethyl) (2′-O-moe) modified nucleotide, a 2′-fluoro (2′-F) modified nucleotide, a phosphorothioate (PS) linkage between nucleotides, an inverted abasic modified nucleotide, or combinations thereof. In some embodiments, the 3′ end modification comprises or further comprises modifications of 1, 2, 3, 4, 5, 6, or 7 nucleotides at the 3′ end of the gRNA. In some embodiments, the 3′ end modification comprises or further comprises one PS linkage, wherein the linkage is between the last and second to last nucleotide. In some embodiments, the 3′ end modification comprises or further comprises two PS linkages between the last three nucleotides. In some embodiments, the 3′ end modification comprises or further comprises four PS linkages between the last four nucleotides. In some embodiments, the 3′ end modification comprises or further comprises PS linkages between any one or more of the last 2, 3, 4, 5, 6, or 7 nucleotides. In some embodiments, the gRNA comprising a 3′ end modification comprises or further comprises a 3′ tail, wherein the 3′ tail comprises a modification of any one or more of the nucleotides present in the 3′ tail. In some embodiments, the 3′ tail is fully modified. In some embodiments, the 3′ tail comprises 1, 2, 3, 4, 5, 6, 7, 8, 9, 10, 1-2, 1-3, 1-4, 1-5, 1-6, 1-7, 1-8, 1-9, or 1-10 nucleotides, optionally where any one or more of these nucleotides are modified. In some embodiments, a gRNA is provided comprising a 3′ end modification, wherein the 3′ end modification comprises the 3′ end modification as shown in any one of SEQ ID Nos: 141-145. In some embodiments, a gRNA is provided comprising a 3′ protective end modification. In some embodiments, the 3′ tail comprises between 1 and about 20 nucleotides, between 1 and about 15 nucleotides, between 1 and about 10 nucleotides, between 1 and about 5 nucleotides, between 1 and about 4 nucleotides, between 1 and about 3 nucleotides, and between 1 and about 2 nucleotides. In some embodiments, the gRNA does not comprise a 3′ tail.

[0359] In some embodiments, the 5′ terminus region is modified, for example, the first 1, 2, 3, 4, 5, 6, or 7 nucleotides of the gRNA are modified. Throughout, this modification may be referred to as a “5′ end modification”. In some embodiments, the first 1, 2, 3, 4, 5, 6, or 7 nucleotides of the 5′ terminus region comprise more than one modification. In some embodiments, at least one of the terminal (i.e., first) 1, 2, 3, 4, 5, 6, or 7 nucleotides at the 5′ end are modified. In some embodiments, both the 5′ and 3′ terminus regions (e.g., ends) of the gRNA are modified. In some embodiments, only the 5′ terminus region of the gRNA is modified. In some embodiments, only the 3′ terminus region (plus or minus a 3′ tail) of the conserved portion of a gRNA is modified. In some embodiments, the gRNA comprises modifications at 1, 2, 3, 4, 5, 6, or 7 of the first 7 nucleotides at a 5′ terminus region of the gRNA. In some embodiments, the gRNA comprises modifications at 1, 2, 3, 4, 5, 6, or 7 of the 7 terminal nucleotides at a 3′ terminus region. In some embodiments, 2, 3, or 4 of the first 4 nucleotides at the 5′ terminus region, and/or 2, 3, or 4 of the terminal 4 nucleotides at the 3′ terminus region are modified. In some embodiments, 2, 3, or 4 of the first 4 nucleotides at the 5′ terminus region are linked with phosphorothioate (PS) bonds. In some embodiments, the modification to the 5′ terminus and/or 3′ terminus comprises a 2′-O-methyl (2′-O-Me) or 2′-O-(2-methoxyethyl) (2′-O-moe) modification. In some embodiments, the modification comprises a 2′-fluoro (2′-F) modification to a nucleotide. In some embodiments, the modification comprises a phosphorothioate (PS) linkage between nucleotides. In some embodiments, the modification comprises an inverted abasic nucleotide. In some embodiments, the modification comprises a protective end modification. In some embodiments, the modification comprises a more than one modification selected from protective end modification, 2′-O-Me, 2′-O-moe, 2′-fluoro (2′-F), a phosphorothioate (PS) linkage between nucleotides, and an inverted abasic nucleotide. In some embodiments, an equivalent modification is encompassed. In some embodiments, a gRNA is provided comprising a 5′ end modification, wherein the 5′ end modification comprises a 5′ end modification as shown in any one of SEQ ID Nos: 141-145.

[0360] In some embodiments, a gRNA is provided comprising a 5′ end modification and a 3′ end modification. In some embodiments, the gRNA comprises modified nucleotides that are not at the 5′ or 3′ ends.

[0361] In some embodiments, a sgRNA is provided comprising an upper stem modification, wherein the upper stem modification comprises a modification to any one or more of US1-US12 in the upper stem region. In some embodiments, a sgRNA is provided comprising an upper stem modification, wherein the upper stem modification comprises a modification of at least 1, 2, 3, 4, 5, 6, 7, 8, 9, 10, 11, or all 12 nucleotides in the upper stem region. In some embodiments, an sgRNA is provided comprising an upper stem modification, wherein the upper stem modification comprises 1, 2, 3, 4, or 5 YA modifications in a YA site. In some embodiments, the upper stem modification comprises a 2′-OMe modified nucleotide, a 2′-O-moe modified nucleotide, a 2′-F modified nucleotide, and/or combinations thereof. Other modifications described herein, such as a 5′ end modification and/or a 3′ end modification may be combined with an upper stem modification.

[0362] In some embodiments, the sgRNA comprises a modification in the hairpin region. In some embodiments, the hairpin region modification comprises at least one modified nucleotide selected from a 2′-O-methyl (2′-OMe) modified nucleotide, a 2′-fluoro (2′-F) modified nucleotide, and/or combinations thereof. In some embodiments, the hairpin region modification is in the hairpin 1 region. In some embodiments, the hairpin region modification is in the hairpin 2 region. In some embodiments, the hairpin modification comprises 1, 2, or 3 YA modifications in a YA site. In some embodiments, the hairpin modification comprises at least 1, 2, 3, 4, 5, or 6 YA modifications. Other modifications described herein, such as an upper stem modification, a 5′ end modification, and/or a 3′ end modification may be combined with a modification in the hairpin region.

[0363] In some embodiments, a gRNA comprises a substituted and optionally shortened hairpin 1 region, wherein at least one of the following pairs of nucleotides are substituted in the substituted and optionally shortened hairpin 1 with Watson-Crick pairing nucleotides: H1-1 and H1-12, H1-2 and H1-11, H1-3 and H1-10, and/or H1-4 and H1-9. “Watson-Crick pairing nucleotides” include any pair capable of forming a Watson-Crick base pair, including A-T, A-U, T-A, U-A, C-G, and G-C pairs, and pairs including modified versions of any of the foregoing nucleotides that have the same base pairing preference. In some embodiments, the hairpin 1 region lacks any one or two of H1-5 through H1-8. In some embodiments, the hairpin 1 region lacks one, two, or three of the following pairs of nucleotides: H1-1 and H1-12, H1-2 and H1-11, H1-3 and H1-10 and/or H1-4 and H1-9. In some embodiments, the hairpin 1 region lacks 1-8 nucleotides of the hairpin 1 region. In any of the foregoing embodiments, the lacking nucleotides may be such that the one or more nucleotide pairs substituted with Watson-Crick pairing nucleotides (H1-1 and H1-12, H1-2 and H1-11, H1-3 and H1-10, and/or H1-4 and H1-9) form a base pair in the gRNA.

[0364] In some embodiments, the gRNA further comprises an upper stem region lacking at least 1 nucleotide, e.g., any of the shortened upper stem regions indicated in Table 7 of U.S. Application No. 62/946,905, the contents of which are hereby incorporated by reference in its entirety, or described elsewhere herein, which may be combined with any of the shortened or substituted hairpin 1 regions described herein.

[0365] In some embodiments, the gRNA described herein further comprises a nexus region, wherein the nexus region lacks at least one nucleotide.

[0366] 3. Chemical Modifications of gRNAs

[0367] In some embodiments, the gRNA is chemically modified. A gRNA comprising one or more modified nucleosides or nucleotides is called a “modified” gRNA or “chemically modified” gRNA, to describe the presence of one or more non-naturally and/or naturally occurring components or configurations that are used instead of or in addition to the canonical A, G, C, and U residues. Modified nucleosides and nucleotides can include one or more of: (i) alteration, e.g., replacement, of one or both of the non-linking phosphate oxygens and/or of one or more of the linking phosphate oxygens in the phosphodiester backbone linkage (an exemplary backbone modification); (ii) alteration, e.g., replacement, of a constituent of the ribose sugar, e.g., of the 2′ hydroxyl on the ribose sugar (an exemplary sugar modification); (iii) wholesale replacement of the phosphate moiety with “dephospho” linkers (an exemplary backbone modification); (iv) modification or replacement of a naturally occurring nucleobase, including with a non-canonical nucleobase (an exemplary base modification); (v) replacement or modification of the ribose-phosphate backbone (an exemplary backbone modification); (vi) modification of the 3′ end or 5′ end of the oligonucleotide, e.g., removal, modification or replacement of a terminal phosphate group or conjugation of a moiety, cap or linker (such 3′ or 5′ cap modifications may comprise a sugar and/or backbone modification); and (vii) modification or replacement of the sugar (an exemplary sugar modification).

[0368] Chemical modifications such as those listed above can be combined to provide modified gRNAs comprising nucleosides and nucleotides (collectively “residues”) that can have two, three, four, or more modifications. For example, a modified residue can have a modified sugar and a modified nucleobase. In some embodiments, every base of a gRNA is modified, e.g., all bases have a modified phosphate group, such as a phosphorothioate group. In certain embodiments, all, or substantially all, of the phosphate groups of an gRNA molecule are replaced with phosphorothioate groups. In some embodiments, modified gRNAs comprise at least one modified residue at or near the 5′ end of the RNA. In some embodiments, modified gRNAs comprise at least one modified residue at or near the 3′ end of the RNA.

[0369] In some embodiments, the gRNA comprises one, two, three or more modified residues. In some embodiments, at least 5% (e.g., at least 5%, at least 10%, at least 15%, at least 20%, at least 25%, at least 30%, at least 35%, at least 40%, at least 45%, at least 50%, at least 55%, at least 60%, at least 65%, at least 70%, at least 75%, at least 80%, at least 85%, at least 90%, at least 95%, or 100%) of the positions in a modified gRNA are modified nucleosides or nucleotides.

[0370] In some embodiments of a backbone modification, the phosphate group of a modified residue can be modified by replacing one or more of the oxygens with a different substituent. Further, the modified residue, e.g., modified residue present in a modified nucleic acid, can include the wholesale replacement of an unmodified phosphate moiety with a modified phosphate group as described herein. In some embodiments, the backbone modification of the phosphate backbone can include alterations that result in either an uncharged linker or a charged linker with unsymmetrical charge distribution.

[0371] Examples of modified phosphate groups include phosphorothioate, phosphoroselenates, borano phosphates, borano phosphate esters, hydrogen phosphonates, phosphoroamidates, alkyl or aryl phosphonates and phosphotriesters.

[0372] Scaffolds that can mimic nucleic acids can also be constructed wherein the phosphate linker and ribose sugar are replaced by nuclease resistant nucleoside or nucleotide surrogates. Such modifications may comprise backbone and sugar modifications. In some embodiments, the nucleobases can be tethered by a surrogate backbone. Examples can include, without limitation, the morpholino, cyclobutyl, pyrrolidine and peptide nucleic acid (PNA) nucleoside surrogates.

[0373] The modified nucleosides and modified nucleotides can include one or more modifications to the sugar group, i.e. at sugar modification. For example, the 2′ hydroxyl group (OH) can be modified, e.g. replaced with a number of different “oxy” or “deoxy” substituents. In some embodiments, modifications to the 2′ hydroxyl group can enhance the stability of the nucleic acid since the hydroxyl can no longer be deprotonated to form a 2′-alkoxide ion. Examples of 2′ hydroxyl group modifications can include alkoxy or aryloxy (OR, wherein “R” can be, e.g., alkyl, cycloalkyl, aryl, aralkyl, heteroaryl or a sugar); polyethyleneglycols (PEG), O(CH₂CH₂O)ₙCH₂CH₂OR wherein R can be, e.g., H or optionally substituted alkyl, and n can be an integer from 0 to 20. In some embodiments, the 2′ hydroxyl group modification can be 2′-O-Me. In some embodiments, the 2′ hydroxyl group modification can be a 2′-fluoro modification, which replaces the 2′ hydroxyl group with a fluoride. In some embodiments, the 2′ hydroxyl group modification can include “locked” nucleic acids (LNA) in which the 2′ hydroxyl can be connected, e.g., by a C₁₋₆ alkylene or C₁₋₆ heteroalkylene bridge, to the 4′ carbon of the same ribose sugar, where exemplary bridges can include methylene, propylene, ether, or amino bridges. In some embodiments, the 2′ hydroxyl group modification can included “unlocked” nucleic acids (UNA) in which the ribose ring lacks the C2′-C3′ bond. In some embodiments, the 2′ hydroxyl group modification can include the methoxyethyl group (MOE), (OCH₂CH₂OCH₃, e.g., a PEG derivative).

[0374] “Deoxy” 2′ modifications can include hydrogen (i.e. deoxyribose sugars, e.g., at the overhang portions of partially dsRNA); halo (e.g., bromo, chloro, fluoro, or iodo); amino (wherein amino can be, e.g., NH2; alkylamino, dialkylamino, heterocyclyl, arylamino, diarylamino, heteroarylamino, diheteroarylamino, or amino acid); NH(CH₂CH₂NH)ₙCH2CH₂— amino (wherein amino can be, e.g., as described herein), —NHC(O)R (wherein R can be, e.g., alkyl, cycloalkyl, aryl, aralkyl, heteroaryl or sugar), cyano; mercapto; alkyl-thio-alkyl; thioalkoxy; and alkyl, cycloalkyl, aryl, alkenyl and alkynyl, which may be optionally substituted with e.g., an amino as described herein.

[0375] The sugar modification can comprise a sugar group which may also contain one or more carbons that possess the opposite stereochemical configuration than that of the corresponding carbon in ribose. Thus, a modified nucleic acid can include nucleotides containing e.g., arabinose, as the sugar. The modified nucleic acids can also include abasic sugars. These abasic sugars can also be further modified at one or more of the constituent sugar atoms. The modified nucleic acids can also include one or more sugars that are in the L form, e.g. L-nucleosides.

[0376] The modified nucleosides and modified nucleotides described herein, which can be incorporated into a modified nucleic acid, can include a modified base, also called a nucleobase. Examples of nucleobases include, but are not limited to, adenine (A), guanine (G), cytosine (C), and uracil (U). These nucleobases can be modified or wholly replaced to provide modified residues that can be incorporated into modified nucleic acids. The nucleobase of the nucleotide can be independently selected from a purine, a pyrimidine, a purine analog, or pyrimidine analog. In some embodiments, the nucleobase can include, for example, naturally-occurring and synthetic derivatives of a base.

[0377] In embodiments employing a dual guide RNA, each of the crRNA and the tracr RNA can contain modifications. Such modifications may be at one or both ends of the crRNA and/or tracr RNA. In embodiments comprising an sgRNA, one or more residues at one or both ends of the sgRNA may be chemically modified, or the entire sgRNA may be chemically modified. Certain embodiments comprise a 5′ end modification. Certain embodiments comprise a 3′ end modification. In certain embodiments, one or more or all of the nucleotides in single stranded overhang of a gRNA molecule are deoxynucleotides.

[0378] In some embodiments, the gRNAs disclosed herein comprise one of the modification patterns disclosed in WO2018/107028 A1, published Jun. 14, 2018 the contents of which are hereby incorporated by reference in their entirety.

[0379] The terms “mA,” “mC,” “mU,” or “mG” may be used to denote a nucleotide that has been modified with 2′-O-Me. The terms “fA,” “fC,” “fU,” or “fU” may be used to denote a nucleotide that has been substituted with 2′-F. A “*” may be used to depict a PS modification. The terms A*, C*, U*, or G* may be used to denote a nucleotide that is linked to the next (e.g., 3′) nucleotide with a PS bond. The terms “mA*,” “mC*,” “mU*,” or “mG*” may be used to denote a nucleotide that has been substituted with 2′-O-Me and that is linked to the next (e.g., 3′) nucleotide with a PS bond.

[0380] H. Lipids; Formulation; Delivery

[0381] Disclosed herein are various embodiments using lipid nucleic acid assembly compositions comprising nucleic acids(s), or composition(s) described herein. In some embodiments, the lipid nucleic acid assembly composition comprises a nucleic acid (e.g., mRNA) comprising an open reading frame encoding a first polypeptide comprising a cytidine deaminase (e.g., A3A) and an RNA-guided nickase. In some embodiments, the lipid nucleic acid assembly composition comprises a first nucleic acid comprising an open reading frame encoding a first polypeptide comprising a cytidine deaminase (e.g., A3A) and an RNA-guided nickase and a second nucleic acid encoding a UGI.

[0382] As used herein, a “lipid nucleic acid assembly composition” refers to lipid-based delivery compositions, including lipid nanoparticles (LNPs) and lipoplexes. LNP refers to lipid nanoparticles <100 nM. LNPs are formed by precise mixing a lipid component (e.g., in ethanol) with an aqueous nucleic acid component and LNPs are uniform in size. Lipoplexes are particles formed by bulk mixing the lipid and nucleic acid components and are between about 100 nm and 1 micron in size. In certain embodiments the lipid nucleic acid assemblies are LNPs. As used herein, a “lipid nucleic acid assembly” comprises a plurality of (i.e. more than one) lipid molecules physically associated with each other by intermolecular forces. A lipid nucleic acid assembly may comprise a bioavailable lipid having a pKa value of <7.5 or <7. The lipid nucleic acid assemblies are formed by mixing an aqueous nucleic acid-containing solution with an organic solvent-based lipid solution, e.g., 100% ethanol. Suitable solutions or solvents include or may contain: water, PBS, Tris buffer, NaCl, citrate buffer, ethanol, chloroform, diethylether, cyclohexane, tetrahydrofuran, methanol, isopropanol. A pharmaceutically acceptable buffer may optionally be comprised in a pharmaceutical formulation comprising the lipid nucleic acid assemblies, e.g., for an ex vivo therapy. In some embodiments, the aqueous solution comprises an RNA, such as an mRNA or a gRNA. In some embodiments, the aqueous solution comprises an mRNA encoding an RNA-guided DNA binding agent, such as Cas9.

[0383] As used herein, lipid nanoparticle (LNP) refers to a particle that comprises a plurality of (i.e., more than one) lipid molecules physically associated with each other by intermolecular forces. The LNPs may be, e.g., microspheres (including unilamellar and multilamellar vesicles, e.g., “liposomes”—lamellar phase lipid bilayers that, in some embodiments, are substantially spherical—and, in more particular embodiments, can comprise an aqueous core, e.g., comprising a substantial portion of RNA molecules), a dispersed phase in an emulsion, micelles, or an internal phase in a suspension. Emulsions, micelles, and suspensions may be suitable compositions for local and/or topical delivery. See also, e.g., WO2017173054A1, the contents of which are hereby incorporated by reference in their entirety. Any LNP known to those of skill in the art to be capable of delivering nucleotides to subjects may be utilized with the guide RNAs and the nucleic acid encoding an RNA-guided nickase and the nucleic acid encoding a cytidine deaminase described herein.

[0384] In some embodiments, the aqueous solution comprises a nucleic acid encoding a polypeptide comprising an A3A and an RNA-guided nickase. A pharmaceutical formulation comprising the lipid nucleic acid assembly composition may optionally comprise a pharmaceutically acceptable buffer.

[0385] In some embodiments, the lipid nucleic acid assembly compositions include an “amine lipid” (sometimes herein or elsewhere described as an “ionizable lipid” or a “biodegradable lipid”), together with an optional “helper lipid”, a “neutral lipid”, and a stealth lipid such as a PEG lipid. In some embodiments, the amine lipids or ionizable lipids are cationic depending on the pH.

[0386] 1. Amine Lipids

[0387] In some embodiments, lipid nucleic acid assembly compositions comprise an “amine lipid”, which is, for example an ionizable lipid such as Lipid A or its equivalents, including acetal analogs of Lipid A.

[0388] In some embodiments, the amine lipid is Lipid A, which is (9Z,12Z)-3-((4,4-bis(octyloxy)butanoyl)oxy)-2-((((3-(diethylamino)propoxy)carbonyl)oxy)methyl)propyl octadeca-9,12-dienoate, also called 3-((4,4-bis(octyloxy)butanoyl)oxy)-2-((((3-(diethylamino)propoxy)carbonyl)oxy)methyl)propyl (9Z,12Z)-octadeca-9,12-dienoate. Lipid A can be depicted as:

[chemical structure]

[0389] Lipid A may be synthesized according to WO2015/095340 (e.g., pp. 84-86). In some embodiments, the amine lipid is an equivalent to Lipid A.

[0390] In some embodiments, an amine lipid is an analog of Lipid A. In some embodiments, a Lipid A analog is an acetal analog of Lipid A. In particular lipid nucleic acid assembly compositions, the acetal analog is a C4-C12 acetal analog. In some embodiments, the acetal analog is a C5-C12 acetal analog. In additional embodiments, the acetal analog is a C5-C10 acetal analog. In further embodiments, the acetal analog is chosen from a C4, C5, C6, C7, C9, C10, C11, and C12 acetal analog.

[0391] Amine lipids and other “biodegradable lipids” suitable for use in the lipid nucleic acid assemblies described herein are biodegradable in vivo or ex vivo. The amine lipids have low toxicity (e.g., are tolerated in animal models without adverse effect in amounts of greater than or equal to 10 mg/kg). In some embodiments, lipid nucleic acid assemblies comprising an amine lipid include those where at least 75% of the amine lipid is cleared from the plasma or the engineered cell within 8, 10, 12, 24, or 48 hours, or 3, 4, 5, 6, 7, or 10 days. In some embodiments, lipid nucleic acid assemblies comprising an amine lipid include those where at least 50% of the nucleic acid, e.g., mRNA or gRNA, is cleared from the plasma within 8, 10, 12, 24, or 48 hours, or 3, 4, 5, 6, 7, or 10 days. In some embodiments, lipid nucleic acid assemblies comprising an amine lipid include those where at least 50% of the lipid nucleic acid assembly is cleared from the plasma within 8, 10, 12, 24, or 48 hours, or 3, 4, 5, 6, 7, or 10 days, for example by measuring a lipid (e.g. an amine lipid), nucleic acid, e.g., RNA/mRNA, or other component. In some embodiments, lipid-encapsulated versus free lipid, RNA, or nucleic acid component of the lipid nucleic acid assembly is measured.

[0392] Biodegradable lipids include, for example the biodegradable lipids of WO/2020/219876, WO/2020/118041, WO/2020/072605, WO/2019/067992, WO/2017/173054, WO2015/095340, and WO2014/136086, and LNPs include LNP compositions described therein, the lipids and compositions of which are hereby incorporated by reference.

[0393] Lipid clearance may be measured as described in literature. See Maier, M. A., et al. Biodegradable Lipids Enabling Rapidly Eliminated Lipid Nanoparticles for Systemic Delivery of RNAi Therapeutics. Mol. Ther. 2013, 21(8), 1570-78 (“Maier”). For example, in Maier, LNP-siRNA systems containing luciferases-targeting siRNA were administered to six- to eight-week old male C57Bl/6 mice at 0.3 mg/kg by intravenous bolus injection via the lateral tail vein. Blood, liver, and spleen samples were collected at 0.083, 0.25, 0.5, 1, 2, 4, 8, 24, 48, 96, and 168 hours post-dose. Mice were perfused with saline before tissue collection and blood samples were processed to obtain plasma. All samples were processed and analyzed by LC-MS. Further, Maier describes a procedure for assessing toxicity after administration of LNP-siRNA formulations. For example, a luciferase-targeting siRNA was administered at 0, 1, 3, 5, and 10 mg/kg (5 animals/group) via single intravenous bolus injection at a dose volume of 5 mL/kg to male Sprague-Dawley rats. After 24 hours, about 1 mL of blood was obtained from the jugular vein of conscious animals and the serum was isolated. At 72 hours post-dose, all animals were euthanized for necropsy. Assessments of clinical signs, body weight, serum chemistry, organ weights and histopathology were performed. Although Maier describes methods for assessing siRNA-LNP formulations, these methods may be applied to assess clearance, pharmacokinetics, and toxicity of administration of lipid nucleic acid assembly compositions of the present disclosure.

[0394] Ionizable and bioavailable lipids for LNP delivery of nucleic acids known in the art are suitable. Lipids may be ionizable depending upon the pH of the medium they are in. For example, in a slightly acidic medium, the lipid, such as an amine lipid, may be protonated and thus bear a positive charge. Conversely, in a slightly basic medium, such as, for example, blood where pH is approximately 7.35, the lipid, such as an amine lipid, may not be protonated and thus bear no charge.

[0395] The ability of a lipid to bear a charge is related to its intrinsic pKa. In some embodiments, the amine lipids of the present disclosure may each, independently, have a pKa in the range of from about 5.1 to about 7.4. In some embodiments, the bioavailable lipids of the present disclosure may each, independently, have a pKa in the range of from about 5.1 to about 7.4, such as from about 5.5 to about 6.6, from about 5.6 to about 6.4, from about 5.8 to about 6.2, or from about 5.8 to about 6.5. For example, the amine lipids of the present disclosure may each, independently, have a pKa in the range of from about 5.8 to about 6.5. Lipids with a pKa ranging from about 5.1 to about 7.4 are effective for delivery of cargo in vivo, e.g. to the liver. Further, it has been found that lipids with a pKa ranging from about 5.3 to about 6.4 are effective for delivery in vivo, e.g. to tumors. See, e.g., WO2014/136086.

[0396] 2. Additional Lipids

[0397] “Neutral lipids” suitable for use in a lipid nucleic acid assembly composition of the disclosure include, for example, a variety of neutral, uncharged or zwitterionic lipids. Examples of neutral phospholipids suitable for use in the present disclosure include, but are not limited to, 5-heptadecylbenzene-1,3-diol (resorcinol), dipalmitoylphosphatidylcholine (DPPC), distearoylphosphatidylcholine (DSPC), pohsphocholine (DOPC), dimyristoylphosphatidylcholine (DMPC), phosphatidylcholine (PLPC), 1,2-distearoyl-sn-glycero-3-phosphocholine (DAPC), phosphatidylethanolamine (PE), egg phosphatidylcholine (EPC), dilauryloylphosphatidylcholine (DLPC), dimyristoylphosphatidylcholine (DMPC), 1-myristoyl-2-palmitoyl phosphatidylcholine (MPPC), 1-palmitoyl-2-myristoyl phosphatidylcholine (PMPC), 1-palmitoyl-2-stearoyl phosphatidylcholine (PSPC), 1,2-diarachidoyl-sn-glycero-3-phosphocholine (DBPC), 1-stearoyl-2-palmitoyl phosphatidylcholine (SPPC), 1,2-dieicosenoyl-sn-glycero-3-phosphocholine (DEPC), palmitoyloleoyl phosphatidylcholine (POPC), lysophosphatidyl choline, dioleoyl phosphatidylethanolamine (DOPE), dilinoleoylphosphatidylcholine distearoylphosphatidylethanolamine (DSPE), dimyristoyl phosphatidylethanolamine (DMPE), dipalmitoyl phosphatidylethanolamine (DPPE), palmitoyloleoyl phosphatidylethanolamine (POPE), lysophosphatidylethanolamine and combinations thereof. In one embodiment, the neutral phospholipid may be selected from the group consisting of distearoylphosphatidylcholine (DSPC) and dimyristoyl phosphatidyl ethanolamine (DMPE). In another embodiment, the neutral phospholipid may be distearoylphosphatidylcholine (DSPC).

[0398] “Helper lipids” include steroids, sterols, and alkyl resorcinols. Helper lipids suitable for use in the present disclosure include, but are not limited to, cholesterol, 5-heptadecylresorcinol, and cholesterol hemisuccinate. In one embodiment, the helper lipid may be cholesterol. In one embodiment, the helper lipid may be cholesterol hemisuccinate.

[0399] “Stealth lipids” are lipids that alter the length of time the nanoparticles can exist in vivo (e.g., in the blood). Stealth lipids may assist in the formulation process by, for example, reducing particle aggregation and controlling particle size. Stealth lipids used herein may modulate pharmacokinetic properties of the lipid nucleic acid assembly or aid in stability of the nanoparticle ex vivo. Stealth lipids suitable for use in a lipid nucleic acid assembly composition of the disclosure include, but are not limited to, stealth lipids having a hydrophilic head group linked to a lipid moiety. Stealth lipids suitable for use in a lipid nucleic acid assembly composition of the present disclosure and information about the biochemistry of such lipids can be found in Romberg et al., Pharmaceutical Research, Vol. 25, No. 1, 2008, pg. 55-71 and Hoekstra et al., Biochimica et Biophysica Acta 1660 (2004) 41-52. Additional suitable PEG lipids are disclosed, e.g., in WO 2006/007712.

[0400] In one embodiment, the hydrophilic head group of stealth lipid comprises a polymer moiety selected from polymers based on PEG. Stealth lipids may comprise a lipid moiety. In some embodiments, the stealth lipid is a PEG lipid.

[0401] In one embodiment, a stealth lipid comprises a polymer moiety selected from polymers based on PEG (sometimes referred to as poly(ethylene oxide)), poly(oxazoline), poly(vinyl alcohol), poly(glycerol), poly(N-vinylpyrrolidone), polyaminoacids and poly[N-(2-hydroxypropyl)methacrylamide].

[0402] In one embodiment, the PEG lipid comprises a polymer moiety based on PEG (sometimes referred to as poly(ethylene oxide)).

[0403] The PEG lipid further comprises a lipid moiety. In some embodiments, the lipid moiety may be derived from diacylglycerol or diacylglycamide, including those comprising a dialkylglycerol or dialkylglycamide group having alkyl chain length independently comprising from about C4 to about C40 saturated or unsaturated carbon atoms, wherein the chain may comprise one or more functional groups such as, for example, an amide or ester. In some embodiments, the alkyl chain length comprises about C10 to C20. The dialkylglycerol or dialkylglycamide group can further comprise one or more substituted alkyl groups. The chain lengths may be symmetrical or asymmetrical.

[0404] Unless otherwise indicated, the term “PEG” as used herein means any polyethylene glycol or other polyalkylene ether polymer. In one embodiment, PEG is an optionally substituted linear or branched polymer of ethylene glycol or ethylene oxide. In one embodiment, PEG is unsubstituted. In one embodiment, the PEG is substituted, e.g., by one or more alkyl, alkoxy, acyl, hydroxy, or aryl groups. In one embodiment, the term includes PEG copolymers such as PEG-polyurethane or PEG-polypropylene (see, e.g., J. Milton Harris, Poly(ethylene glycol) chemistry: biotechnical and biomedical applications (1992)); in another embodiment, the term does not include PEG copolymers. In one embodiment, the PEG has a molecular weight of from about 130 to about 50,000, in a sub-embodiment, about 150 to about 30,000, in a sub-embodiment, about 150 to about 20,000, in a sub-embodiment about 150 to about 15,000, in a sub-embodiment, about 150 to about 10,000, in a sub-embodiment, about 150 to about 6,000, in a sub-embodiment, about 150 to about 5,000, in a sub-embodiment, about 150 to about 4,000, in a sub-embodiment, about 150 to about 3,000, in a sub-embodiment, about 300 to about 3,000, in a sub-embodiment, about 1,000 to about 3,000, and in a sub-embodiment, about 1,500 to about 2,500.

[0405] In some embodiments, the PEG (e.g., conjugated to a lipid moiety or lipid, such as a stealth lipid), is a “PEG-2K,” also termed “PEG 2000,” which has an average molecular weight of about 2,000 daltons. PEG-2K is represented herein by the following formula (I), wherein n is 45, meaning that the number averaged degree of polymerization comprises about 45 subunits

[chemical structure]

However, other PEG embodiments known in the art may be used, including, e.g., those where the number-averaged degree of polymerization comprises about 23 subunits (n=23), and/or 68 subunits (n=68). In some embodiments, n may range from about 30 to about 60. In some embodiments, n may range from about 35 to about 55. In some embodiments, n may range from about 40 to about 50. In some embodiments, n may range from about 42 to about 48. In some embodiments, n may be 45. In some embodiments, R may be selected from H, substituted alkyl, and unsubstituted alkyl. In some embodiments, R may be unsubstituted alkyl. In some embodiments, R may be methyl.

[0406] In any of the embodiments described herein, the PEG lipid may be selected from PEG-dilauroylglycerol, PEG-dimyristoylglycerol (PEG-DMG) (catalog #GM-020 from NOF, Tokyo, Japan), PEG-dipalmitoylglycerol, PEG-distearoylglycerol (PEG-DSPE) (catalog #DSPE-020CN, NOF, Tokyo, Japan), PEG-dilaurylglycamide, PEG-dimyristylglycamide, PEG-dipalmitoylglycamide, and PEG-distearoylglycamide, PEG-cholesterol (1-[8′-(Cholest-5-en-3[beta]-oxy)carboxamido-3′,6′-dioxaoctanyl]carbamoyl-[omega]-methyl-poly(ethylene glycol), PEG-DMB (3,4-ditetradecoxylbenzyl-[omega]-methyl-poly(ethylene glycol)ether), 1,2-dimyristoyl-sn-glycero-3-phosphoethanolamine-N-[methoxy(polyethylene glycol)-2000] (PEG2k-DMG) (cat. #880150P from Avanti Polar Lipids, Alabaster, Alabama, USA), 1,2-distearoyl-sn-glycero-3-phosphoethanolamine-N-[methoxy(polyethylene glycol)-2000] (PEG2k-DSPE) (cat. #880120C from Avanti Polar Lipids, Alabaster, Alabama, USA), 1,2-distearoyl-sn-glycerol, methoxypolyethylene glycol (PEG2k-DSG; GS-020, NOF Tokyo, Japan), poly(ethylene glycol)-2000-dimethacrylate (PEG2k-DMA), and 1,2-distearyloxypropyl-3-amine-N-[methoxy(polyethylene glycol)-2000] (PEG2k-DSA). In one embodiment, the PEG lipid may be PEG2k-DMG. In some embodiments, the PEG lipid may be PEG2k-DSG. In one embodiment, the PEG lipid may be PEG2k-DSPE. In one embodiment, the PEG lipid may be PEG2k-DMA. In one embodiment, the PEG lipid may be PEG2k-C-DMA. In one embodiment, the PEG lipid may be compound S027, disclosed in WO2016/010840 (paragraphs [00240] to [00244]). In one embodiment, the PEG lipid may be PEG2k-DSA. In one embodiment, the PEG lipid may be PEG2k-C11. In some embodiments, the PEG lipid may be PEG2k-C14. In some embodiments, the PEG lipid may be PEG2k-C16. In some embodiments, the PEG lipid may be PEG2k-C18.

[0407] 3. Formulations

[0408] The lipid nucleic acid assembly may contain (i) a biodegradable lipid, (ii) an optional neutral lipid, (iii) a helper lipid, and (iv) a stealth lipid, such as a PEG lipid. The lipid nucleic acid assembly may contain a biodegradable lipid and one or more of a neutral lipid, a helper lipid, and a stealth lipid, such as a PEG lipid.

[0409] The lipid nucleic acid assembly may contain (i) an amine lipid for encapsulation and for endosomal escape, (ii) a neutral lipid for stabilization, (iii) a helper lipid, also for stabilization, and (iv) a stealth lipid, such as a PEG lipid. The lipid nucleic acid assembly may contain an amine lipid and one or more of a neutral lipid, a helper lipid, also for stabilization, and a stealth lipid, such as a PEG lipid.

[0410] The mRNAs required to achieve the described functional effects described herein may be delivered to a cell in one or more lipid nucleic acid assembly composition(s). For example, one lipid nucleic acid assembly composition may be formulated for delivery comprising mRNA encoding a polypeptide comprising a cytidine deaminase (e.g., an APOBEC3A deaminase (A3A)) and an RNA-guided nickase and additional mRNAs encoding, for example, one or more UGIs and one or more gRNAs. Alternatively, the mRNA encoding the polypeptide comprising a cytidine deaminase (e.g., an APOBEC3A deaminase (A3A)) and an RNA-guided nickase, mRNA encoding one or more UGI, and mRNA encoding one or more gRNAs may be formulated in separate lipid nucleic acid assembly compositions. As such, one or multiple lipid nucleic acid assembly composition(s) may be delivered to a cell in vitro or in vivo.

[0411] In some embodiments, a method of modifying a target gene in a cell is provided, comprising delivering to the cell one or more lipid nucleic acid assembly compositions, optionally lipid nanoparticles, comprising:
[0412] (a) a first mRNA comprising a first open reading frame encoding a polypeptide comprising a cytidine deaminase (e.g., an APOBEC3A deaminase (A3A)) and an RNA-guided nickase;
[0413] (b) a second mRNA comprising a second open reading frame encoding a uracil glycosylase inhibitor (UGI); and
[0414] (c) one or more guide RNAs.

[0415] In some embodiments, parts (a) and (b) are in separate lipid nucleic acid assembly compositions. In some embodiments, parts (a) and (b) are in the same lipid nucleic acid assembly composition. In some embodiments, parts (a) and (c) are in separate lipid nucleic acid assembly compositions. In some embodiments, parts (a) and (c) are in the same lipid nucleic acid assembly composition. In some embodiments, parts (b) and (c) are in separate lipid nucleic acid assembly compositions. In some embodiments, parts (a) and (c) are in the same lipid nucleic acid assembly composition, and part (b) is in a separate lipid nucleic acid assembly composition. In some embodiments, parts (a), (b), and (c) are each in separate lipid nucleic acid assembly compositions. In some embodiments, parts (a), (b), and (c) are in the same lipid nucleic acid assembly composition. In some embodiments, the one or more guide RNAs are each in separate lipid nucleic acid assembly compositions.

[0416] In some embodiments, the method further comprise delivering one or more guide RNAs in one or more lipid nucleic acid assembly compositions that are separate from the lipid nucleic acid assembly compositions comprising the A3A and UGI.

[0417] In some embodiments, at least 2, 3, 4, 5, 6, 7, 8, 9, or 10 lipid nucleic acid assembly compositions are delivered to the cell. In some embodiments, the at least one lipid nucleic acid assembly composition comprises lipid nanoparticle (LNPs). In some embodiments, all lipid nucleic acid assembly compositions comprise LNPs. In some embodiments, at least one lipid nucleic acid assembly composition is a lipoplex composition.

[0418] In some embodiments, the lipid nucleic acid assembly composition, e.g., LNP composition, comprises an mRNA that encodes a polypeptide comprising a cytidine deaminase (e.g., an APOBEC3A deaminase (A3A)) and an RNA-guided nickase, as described herein. In some embodiments, the lipid nucleic acid assembly composition, e.g. LNP composition, comprises an mRNA that encodes a polypeptide comprising an APOBEC3A deaminase (A3A) and an RNA-guided nickase; and a gRNA.

[0419] In some embodiments, the lipid nucleic acid assembly composition comprises a first lipid nucleic acid assembly composition comprising an mRNA encoding a first polypeptide comprising a cytidine deaminase (e.g., an APOBEC3A deaminase (A3A)) and an RNA-guided nickase. In some embodiments, the lipid nucleic acid assembly composition further comprises a second lipid nucleic acid assembly composition comprising a gRNA.

[0420] In some embodiments, the lipid nucleic acid assembly composition comprises a first composition comprising a mRNA encoding a first polypeptide comprising a cytidine deaminase (e.g., an APOBEC3A deaminase (A3A)) and an RNA-guided nickase; and one or more second mRNA encoding a uracil glycosylase inhibitor (UGI). In some embodiments, the lipid nucleic acid assembly composition further comprises one or more gRNA.

[0421] In some embodiments, the lipid nucleic acid assembly composition further comprises a second lipid nucleic acid assembly composition comprising a gRNA. In some embodiments, the lipid nucleic acid assembly composition comprises first and second lipid nucleic acid assembly compositions, wherein the first composition comprises an mRNA encoding polypeptide comprising a cytidine deaminase (e.g., an APOBEC3A deaminase (A3A)) and an RNA-guided nickase; and the second composition comprises one or more mRNA encoding a uracil glycosylase inhibitor (UGI). In some embodiments, the first lipid nucleic acid assembly composition or the second lipid nucleic acid assembly composition further comprises one or more gRNA. In some embodiments, the lipid nucleic acid assembly composition further comprises a third lipid nucleic acid assembly composition comprising one or more gRNA.

[0422] In some embodiments, the lipid nucleic acid assembly composition comprises a first lipid nucleic acid assembly composition comprising an mRNA comprising an open reading frame encoding a first polypeptide comprising a cytidine deaminase (e.g., an APOBEC3A deaminase (A3A)) and an RNA-guided nickase and a second lipid nucleic acid assembly composition comprising one or more guide RNA (gRNA).

[0423] In some embodiments, the lipid nucleic acid assembly composition comprises a first composition comprising a first mRNA comprising a first open reading frame encoding a first polypeptide comprising a cytidine deaminase (e.g., an APOBEC3A deaminase (A3A)) and an RNA-guided nickase; and a second mRNA comprising one or more second open reading frame encoding a uracil glycosylase inhibitor (UGI). In some embodiments, the lipid nucleic acid assembly composition further comprises one or more gRNA. In some embodiments, the lipid nucleic acid assembly composition further comprises a second lipid nucleic acid assembly composition comprising one or more gRNA.

[0424] In some embodiments, the lipid nucleic acid assembly composition comprises first and second lipid nucleic acid assembly compositions, wherein the first composition comprises a first mRNA comprising a first open reading frame encoding a first polypeptide comprising a cytidine deaminase (e.g., an APOBEC3A deaminase (A3A)) and an RNA-guided nickase; the second composition comprises a second mRNA comprising a second open reading frame encoding a uracil glycosylase inhibitor (UGI). In some embodiments, the first lipid nucleic acid assembly composition or the second lipid nucleic acid assembly composition further comprises a gRNA. In some embodiments, the lipid nucleic acid assembly composition further comprises a third lipid nucleic acid assembly composition comprising a gRNA.

[0425] In some embodiments, the lipid nucleic acid assembly composition comprises a first composition comprising a first mRNA comprising a first open reading frame encoding a first polypeptide comprising a cytidine deaminase (e.g., an APOBEC3A deaminase (A3A)) and an RNA-guided nickase; and the second composition comprises a uracil glycosylase inhibitor (UGI). In some embodiments, the first lipid nucleic acid assembly composition or the second lipid nucleic acid assembly composition further comprises a gRNA. In some embodiments, the lipid nucleic acid assembly composition further comprises a third lipid nucleic acid assembly composition comprising a gRNA.

[0426] In some embodiments, the lipid nucleic acid assembly composition comprises first and second lipid nucleic acid assembly compositions, wherein the first composition comprises a polypeptide comprising a cytidine deaminase (e.g., an APOBEC3A deaminase (A3A)) and an RNA-guided nickase; the second composition comprises a second mRNA comprising a second open reading frame encoding a uracil glycosylase inhibitor (UGI). In some embodiments, the first lipid nucleic acid assembly composition or the second lipid nucleic acid assembly composition further comprises a gRNA. In some embodiments, the lipid nucleic acid assembly composition further comprises a third lipid nucleic acid assembly composition comprising a gRNA.

[0427] In certain embodiments, a lipid nucleic acid assembly composition may comprise mRNA, optionally a gRNA, an amine lipid, a helper lipid, a neutral lipid, and a stealth lipid. In certain lipid nucleic acid assembly compositions, the helper lipid is cholesterol. In other lipid nucleic acid assembly compositions, the neutral lipid is DSPC. In additional embodiments, the stealth lipid is PEG2k-DMG or PEG2k-C11. In certain embodiments, the lipid nucleic acid assembly composition comprises Lipid A or an equivalent of Lipid A; a helper lipid; a neutral lipid; a stealth lipid. In certain compositions, the amine lipid is Lipid A. In certain compositions, the amine lipid is Lipid A or an acetal analog thereof; the helper lipid is cholesterol; the neutral lipid is DSPC; and the stealth lipid is PEG2k-DMG.

[0428] Embodiments of the present disclosure also provide lipid nucleic acid assembly compositions described according to the molar ratio between the positively charged amine groups of the amine lipid (N) and the negatively charged phosphate groups (P) of the nucleic acid to be encapsulated. This may be mathematically represented by the equation N/P. In some embodiments, a lipid nucleic acid assembly composition may comprise a lipid component that comprises an amine lipid, a helper lipid, a neutral lipid, and a PEG lipid; and a nucleic acid component, wherein the N/P ratio is about 3 to 10. In some embodiments, a lipid nucleic acid assembly composition may comprise a lipid component that comprises an amine lipid, a helper lipid, and a PEG lipid; and a nucleic acid component, wherein the N/P ratio is about 3 to 10. In some embodiments, a lipid nucleic acid assembly composition may comprise a lipid component that comprises an amine lipid, a helper lipid, a neutral lipid, and a helper lipid; and an RNA component, wherein the N/P ratio is about 3 to 10. In some embodiments, a lipid nucleic acid assembly composition may comprise a lipid component that comprises an amine lipid, a helper lipid, and a PEG lipid; and an RNA component, such as an mRNA or gRNA, wherein the N/P ratio is about 3 to 10. In one embodiment, the N/P ratio may be about 5 to 7. In one embodiment, the N/P ratio may be about 3 to 7. In one embodiment, the N/P ratio may be about 4.5 to 8. In one embodiment, the N/P ratio may be about 6. In one embodiment, the N/P ratio may be 6±1. In one embodiment, the N/P ratio may be 6±0.5. In some embodiments, the N/P ratio will be ±30%, ±25%, ±20%, ±15%, ±10%, ±5%, or ±2.5% of the target N/P ratio. In certain embodiments, LNP inter-lot variability will be less than 15%, less than 10% or less than 5%.

[0429] In some embodiments, lipid nucleic acid assembly compositions are formed by mixing an aqueous RNA solution with an organic solvent-based lipid solution, e.g., 100% ethanol. Suitable solutions or solvents include or may contain: water, PBS, Tris buffer, NaCl, citrate buffer, ethanol, chloroform, diethylether, cyclohexane, tetrahydrofuran, methanol, isopropanol. A pharmaceutically acceptable buffer, e.g., for in vivo administration of lipid nucleic acid assembly compositions, may be used. In certain embodiments, a buffer is used to maintain the pH of the composition comprising lipid nucleic acid assembly compositions at or above pH 6.5. In certain embodiments, a buffer is used to maintain the pH of the composition comprising LNPs at or above pH 7.0. In certain embodiments, the composition has a pH ranging from about 7.2 to about 7.7. In additional embodiments, the composition has a pH ranging from about 7.3 to about 7.7 or ranging from about 7.4 to about 7.6. In further embodiments, the composition has a pH of about 7.2, 7.3, 7.4, 7.5, 7.6, or 7.7. The pH of a composition may be measured with a micro pH probe. In certain embodiments, a cryoprotectant is included in the composition. Non-limiting examples of cryoprotectants include sucrose, trehalose, glycerol, DMSO, and ethylene glycol. Exemplary compositions may include up to 10% cryoprotectant, such as, for example, sucrose. In certain embodiments, the lipid nucleic acid assembly composition may include about 1, 2, 3, 4, 5, 6, 7, 8, 9, or 10% cryoprotectant. In certain embodiments, the lipid nucleic acid assembly composition may include about 1, 2, 3, 4, 5, 6, 7, 8, 9, or 10% sucrose. In some embodiments, the lipid nucleic acid assembly composition may include a buffer. In some embodiments, the buffer may comprise a phosphate buffer (PBS), a Tris buffer, a citrate buffer, and mixtures thereof. In certain exemplary embodiments, the buffer comprises NaCl. In certain embodiments, NaCl is omitted. Exemplary amounts of NaCl may range from about 20 mM to about 45 mM. Exemplary amounts of NaCl may range from about 40 mM to about 50 mM. In some embodiments, the amount of NaCl is about 45 mM. In some embodiments, the buffer is a Tris buffer. Exemplary amounts of Tris may range from about 20 mM to about 60 mM. Exemplary amounts of Tris may range from about 40 mM to about 60 mM. In some embodiments, the amount of Tris is about 50 mM. In some embodiments, the buffer comprises NaCl and Tris. Certain exemplary embodiments of the lipid nucleic acid assembly compositions contain 5% sucrose and 45 mM NaCl in Tris buffer. In other exemplary embodiments, compositions contain sucrose in an amount of about 5% w/v, about 45 mM NaCl, and about 50 mM Tris at pH 7.5. The salt, buffer, and cryoprotectant amounts may be varied such that the osmolality of the overall formulation is maintained. For example, the final osmolality may be maintained at less than 450 mOsm/L. In further embodiments, the osmolality is between 350 and 250 mOsm/L. Certain embodiments have a final osmolality of 300+/−20 mOsm/L.

[0430] In some embodiments, microfluidic mixing, T-mixing, or cross-mixing is used. In certain aspects, flow rates, junction size, junction geometry, junction shape, tube diameter, solutions, and/or nucleic acids and lipid concentrations may be varied. Lipid nucleic acid assembly compositions may be concentrated or purified, e.g., via dialysis, tangential flow filtration, or chromatography. The lipid nucleic acid assembly compositions may be stored as a suspension, an emulsion, or a lyophilized powder, for example. In some embodiments, an lipid nucleic acid assembly composition is stored at 2-8° C., in certain aspects, the LNP compositions are stored at room temperature. In additional embodiments, a lipid nucleic acid assembly composition is stored frozen, for example at −20° C. or −80° C. In other embodiments, a lipid nucleic acid assembly composition is stored at a temperature ranging from about 0° C. to about −80° C. Frozen lipid nucleic acid assembly compositions may be thawed before use, for example on ice, at room temperature, or at 25° C.

[0431] The lipid nucleic acid assembly compositions may be, e.g., microspheres, a dispersed phase in an emulsion, micelles, or an internal phase in a suspension.

[0432] Moreover, in some embodiments, the lipid nucleic acid assembly compositions are biodegradable, in that they do not accumulate to cytotoxic levels in vivo at a therapeutically effective dose. In some embodiments, the lipid nucleic acid assembly compositions do not cause an innate immune response that leads to substantial adverse effects at a therapeutic dose level. In some embodiments, the lipid nucleic acid assembly compositions provided herein do not cause toxicity at a therapeutic dose level.

[0433] The LNPs disclosed herein may have a size (e.g., Z-average diameter) of about 1 to about 150 nm. In some embodiments, the LNPs have a size of about 10 to about 200 nm. In some embodiments, the LNPs have a size of about 50 to about 100 nm. In some embodiments, the LNPs have a size of about 60 to about 100 nm. In some embodiments, the LNPs have a size of about 75 to about 100 nm. In some embodiments, the LNP composition comprises a population of the LNP with an average diameter of about 20-100 nm. In some embodiments, the LNP composition comprises a population of the LNP with an average diameter of about 50-100 nm. In some embodiments, the LNP composition comprises a population of the LNP with an average diameter of about 60-100 nm. In some embodiments, the LNP composition comprises a population of the LNP with an average diameter of or about 75-100 nm. Unless indicated otherwise, all sizes referred to herein are the average sizes (diameters) of the fully formed nanoparticles, as measured by dynamic light scattering on a Malvern Zetasizer. The nanoparticle sample is diluted in phosphate buffered saline (PBS) so that the count rate is approximately 200-400 kcps. The data is presented as a weighted-average of the intensity measure (Z-average diameter).

[0434] In some embodiments, the LNPs are formed with an average encapsulation efficiency ranging from about 50% to about 100%. In some embodiments, the LNPs are formed with an average encapsulation efficiency ranging from about 50% to about 70%. In some embodiments, the LNPs are formed with an average encapsulation efficiency ranging from about 70% to about 90%. In some embodiments, the LNPs are formed with an average encapsulation efficiency ranging from about 90% to about 100%. In some embodiments, the LNPs are formed with an average encapsulation efficiency ranging from about 75% to about 95%.

[0435] In some embodiments, the LNPs are formed with an average molecular weight ranging from about 1.00E+05 g/mol to about 1.00E+10 g/mol. In some embodiments, the LNPs are formed with an average molecular weight ranging from about 5.00E+05 g/mol to about 7.00E+07 g/mol. In some embodiments, the LNPs are formed with an average molecular weight ranging from about 1.00E+06 g/mol to about 1.00E+10 g/mol. In some embodiments, the LNPs are formed with an average molecular weight ranging from about 1.00E+07 g/mol to about 1.00E+09 g/mol. In some embodiments, the LNPs are formed with an average molecular weight ranging from about 5.00E+06 g/mol to about 5.00E+09 g/mol.

[0436] In some embodiments, the polydispersity (Mw/Mn; the ratio of the weight averaged molar mass (Mw) to the number averaged molar mass (Mn)) may range from about 1.000 to about 2.000. In some embodiments, the Mw/Mn may range from about 1.00 to about 1.500. In some embodiments, the Mw/Mn may range from about 1.020 to about 1.400. In some embodiments, the Mw/Mn may range from about 1.010 to about 1.100. In some embodiments, the Mw/Mn may range from about 1.100 to about 1.350.

[0437] Dynamic Light Scattering (“DLS”) can be used to characterize the polydispersity index (“pdi”) and size of the LNPs of the present disclosure. DLS measures the scattering of light that results from subjecting a sample to a light source. PDI, as determined from DLS measurements, represents the distribution of particle size (around the mean particle size) in a population, with a perfectly uniform population having a PDI of zero. In some embodiments, the pdi may range from 0.005 to 0.75. In some embodiments, the pdi may range from 0.01 to 0.5. In some embodiments, the pdi may range from 0.02 to 0.4. In some embodiments, the pdi may range from 0.03 to 0.35. In some embodiments, the pdi may range from 0.1 to 0.35. In some embodiments, the pdi may range about zero to about 0.4, such as about zero to about 0.35. In some embodiments, the pdi may range from about zero to about 0.35, about zero to about 0.3, about zero to about 0.25, or about zero to about 0.2. In some embodiments, the pdi is less than about 0.08, 0.1, 0.15, 0.2, or 0.4.

[0438] In some embodiments, LNPs disclosed herein have a size of 1 to 250 nm. In some embodiments, the LNPs have a size of 10 to 200 nm. In further embodiments, the LNPs have a size of 20 to 150 nm. In some embodiments, the LNPs have a size of 50 to 150 nm. In some embodiments, the LNPs have a size of 50 to 100 nm. In some embodiments, the LNPs have a size of 50 to 120 nm. In some embodiments, the LNPs have a size of 75 to 150 nm. In some embodiments, the LNPs have a size of 30 to 200 nm. Unless indicated otherwise, all sizes referred to herein are the average sizes (diameters) of the fully formed nanoparticles, as measured by dynamic light scattering on a Malvern Zetasizer. The nanoparticle sample is diluted in phosphate buffered saline (PBS) so that the count rate is approximately 200-400 kcts. The data is presented as a weighted-average of the intensity measure. In some embodiments, the LNPs are formed with an average encapsulation efficiency ranging from 50% to 100%. In some embodiments, the LNPs are formed with an average encapsulation efficiency ranging from 50% to 70%. In some embodiments, the LNPs are formed with an average encapsulation efficiency ranging from 70% to 90%. In some embodiments, the LNPs are formed with an average encapsulation efficiency ranging from 90% to 100%. In some embodiments, the LNPs are formed with an average encapsulation efficiency ranging from 75% to 95%.

[0439] Electroporation is also a well-known means for delivery of cargo, and any electroporation methodology may be used for delivery of any one of the RNAs disclosed herein.

[0440] In some embodiments, the methods comprises a method for delivering a composition comprising the mRNA disclosed herein to an ex vivo cell, wherein the mRNA is encapsulated in an LNP. In some embodiments, the composition comprises the mRNA and one or more additional RNAs disclosed herein encapsulated in the LNP.

[0441] In some embodiments, a lipid nucleic acid assembly composition comprises a lipid component, wherein the lipid component comprises an amine lipid, a neutral lipid, a helper lipid, and a stealth lipid; and wherein the N/P ratio is about 1-10.

[0442] In some instances, the lipid component comprises Lipid A or its acetal analog, cholesterol, DSPC, and PEG-DMG; and wherein the N/P ratio is about 1-10. In some embodiments, the lipid component comprises: about 40-60 mol-% amine lipid; about 5-15 mol-% neutral lipid; and about 1.5-10 mol-% PEG lipid, wherein the remainder of the lipid component is helper lipid, and wherein the N/P ratio of the lipid nucleic acid assembly composition is about 3-10. In some embodiments, the lipid component comprises about 50-60 mol-% amine lipid; about 8-10 mol-% neutral lipid; and about 2.5-4 mol-% PEG lipid, wherein the remainder of the lipid component is helper lipid, and wherein the N/P ratio of the lipid nucleic acid assembly composition is about 3-8. In some instances, the lipid component comprises: about 50-60 mol-% amine lipid; about 5-15 mol-% DSPC; and about 2.5-4 mol-% PEG lipid, wherein the remainder of the lipid component is cholesterol, and wherein the N/P ratio of the lipid nucleic acid assembly composition is about 3-8. In some instances, the lipid component comprises: 48-53 mol-% Lipid A; about 8-10 mol-% DSPC; and 1.5-10 mol-% PEG lipid, wherein the remainder of the lipid component is cholesterol, and wherein the N/P ratio of the lipid nucleic acid assembly composition is 3-8±0.2.

[0443] In some embodiments, the lipid component comprises about 50-60 mol-% amine lipid such as Lipid A, about 8-10 mol-% neutral lipid; and about 2.5-4 mol-% stealth lipid (e.g., a PEG lipid), wherein the remainder of the lipid component is helper lipid, and wherein the N/P ratio of the lipid nucleic acid assembly composition is about 6. In some embodiments, the lipid component comprises about 50-60 mol-% amine lipid such as Lipid A; about 27-39.5 mol-% helper lipid; about 8-10 mol-% neutral lipid; and about 2.5-4 mol-% stealth lipid (e.g., a PEG lipid), wherein the N/P ratio of the lipid nucleic acid assembly composition is about 5-7 (e.g., about 6). In some embodiments, the lipid component comprises about 50-60 mol-% amine lipid such as Lipid A; about 5-15 mol-% neutral lipid; and about 2.5-4 mol-% Stealth lipid (e.g., a PEG lipid), wherein the remainder of the lipid component is helper lipid, and wherein the N/P ratio of the lipid nucleic acid assembly composition is about 3-10. In some embodiments, the lipid component comprises about 40-60 mol-% amine lipid such as Lipid A; about 5-15 mol-% neutral lipid; and about 2.5-4 mol-% Stealth lipid (e.g., a PEG lipid), wherein the remainder of the lipid component is helper lipid, and wherein the N/P ratio of the lipid nucleic acid assembly composition is about 6. In some embodiments, the lipid component comprises about 50-60 mol-% amine lipid such as Lipid A; about 5-15 mol-% neutral lipid; and about 1.5-10 mol-% Stealth lipid (e.g., a PEG lipid), wherein the remainder of the lipid component is helper lipid, and wherein the N/P ratio of the lipid nucleic acid assembly composition is about 6. In some embodiments, the lipid component comprises about 40-60 mol-% amine lipid such as Lipid A; about 0-10 mol-% neutral lipid; and about 1.5-10 mol-% Stealth lipid (e.g., a PEG lipid), wherein the remainder of the lipid component is helper lipid, and wherein the N/P ratio of the lipid nucleic acid assembly composition is about 3-10. In some embodiments, the lipid component comprises about 40-60 mol-% amine lipid such as Lipid A; less than about 1 mol-% neutral lipid; and about 1.5-10 mol-% Stealth lipid (e.g., a PEG lipid), wherein the remainder of the lipid component is helper lipid, and wherein the N/P ratio of the lipid nucleic acid assembly composition is about 3-10. In some embodiments, the lipid component comprises about 40-60 mol-% amine lipid such as Lipid A; and about 1.5-10 mol-% Stealth lipid (e.g., a PEG lipid), wherein the remainder of the lipid component is helper lipid, wherein the N/P ratio of the lipid nucleic acid assembly composition is about 3-10, and wherein the lipid nucleic acid assembly composition is essentially free of or free of neutral phospholipid. In some embodiments, the lipid component comprises about 50-60 mol-% amine lipid such as Lipid A; about 8-10 mol-% neutral lipid; and about 2.5-4 mol-% Stealth lipid (e.g., a PEG lipid), wherein the remainder of the lipid component is helper lipid, and wherein the N/P ratio of the Lipid nucleic acid assembly composition is about 3-7.

[0444] In some embodiments, the amine lipid is present at about 50 mol-%. In some embodiments, the neutral lipid is present at about 9 mol-%. In some embodiments, the stealth lipid is present at about 3 mol-%. In some embodiments, the helper lipid is present at about 38 mol-%.

[0445] In some embodiments, the lipid component comprises, consists essentially of, or consists of: about 50 mol-% amine lipid such as Lipid A; about 9 mol-% neutral lipid such as DSPC; about 3 mol-% of a stealth lipid such as a PEG lipid, such as PEG2k-DMG, and the remainder of the lipid component is helper lipid such as cholesterol, wherein the N/P ratio of the lipid nucleic acid assembly composition is about 6. In some embodiments, the amine lipid is Lipid A. In some embodiments, the neutral lipid is DSPC. In some embodiments, the stealth lipid is a PEG lipid. In some embodiments, the stealth lipid is a PEG2k-DMG. In some embodiments, the helper lipid is cholesterol. In some embodiments, the lipid comprises a lipid component and the lipid component comprises: about 50 mol-% Lipid A; about 9 mol-% DSPC; about 3 mol-% of PEG2k-DMG, and the remainder of the lipid component is cholesterol wherein the N/P ratio of the lipid nucleic acid assembly composition is about 6.

[0446] In some embodiments, the lipid component comprises, consists essentially of, or consists of: about 25 to 45 mol-% amine lipid such as Lipid A; about 10 to 30 mol-% neutral lipid such as DSPC; about 1.5 to 3.5 mol-% of a stealth lipid such as a PEG lipid, such as PEG2k-DMG, and about 25 to 65 mol % helper lipid such as cholesterol, wherein the N/P ratio of the lipid nucleic acid assembly composition is about 6. In some embodiments, the lipid component comprises, consists essentially of, or consists of: about 35 mol-% amine lipid such as Lipid A; about 15 mol-% neutral lipid such as DSPC; about 2.5 mol-% of a stealth lipid such as a PEG lipid, such as PEG2k-DMG, and the remainder of the lipid component is helper lipid such as cholesterol, wherein the N/P ratio of the lipid nucleic acid assembly composition is about 6. In some embodiments, the amine lipid is Lipid A. In some embodiments, the neutral lipid is DSPC. In some embodiments, the stealth lipid is a PEG lipid. In some embodiments, the stealth lipid is a PEG2k-DMG. In some embodiments, the helper lipid is cholesterol. In some embodiments, the lipid comprises a lipid component and the lipid component comprises: about 35 mol-% Lipid A; about 15 mol-% DSPC; about 2.5 mol-% of PEG2k-DMG, and the remainder of the lipid component is cholesterol wherein the N/P ratio of the lipid nucleic acid assembly composition is about 6.

### I. Exemplary Uses, Methods, and Treatments

[0447] In some embodiments, a nucleic acid (e.g., mRNA), polypeptide, composition, or lipid nucleic acid assembly composition disclosed herein is for use in genome editing, e.g., editing a target gene, or modifying a target gene. In some embodiments, a nucleic acid (e.g., mRNA), polypeptide, composition, or lipid nucleic acid assembly composition disclosed herein is for use in modifying a target gene, e.g., altering its sequence or epigenetic status. In some embodiments, the nucleic acid (e.g., mRNA), polypeptide, composition, or lipid nucleic acid assembly composition disclosed herein is for use in the manufacture of a medicament for genome editing or modifying a target gene.

[0448] In some embodiments, the use of a nucleic acid (e.g., mRNA), polypeptide, composition, or lipid nucleic acid assembly composition disclosed herein is provided for the preparation of a medicament for genome editing, e.g., editing a target gene. In some embodiments, the use of a nucleic acid (e.g., mRNA), polypeptide, composition, or lipid nucleic acid assembly composition is provided for the preparation of a medicament for modifying a target gene, e.g., altering its sequence or epigenetic status. In some embodiments, the use of a nucleic acid (e.g., mRNA), polypeptide, composition, or lipid nucleic acid assembly composition disclosed herein is provided for the preparation of a medicament for causing C-to-T conversion within a target gene.

[0449] In some embodiments, a method of genome editing or modifying a target gene is provided, the method comprising delivering to a cell the mRNA, composition, or lipid nanoparticle(s) described herein.

[0450] In some embodiments, the method generates a cytosine (C) to thymine (T) conversion within a target gene.

[0451] In some embodiments, the method causes at least 50% C-to-T conversion relative to the total edits in the target sequence. As used herein, the “total edits in the target sequence” is the sum of each read with an indel or at least one conversion, wherein an indel can comprise more than one nucleotide. Indel is calculated as the total number of sequencing reads with one or more base inserted or deleted within the 20 bp scoring region divided by the total number of sequencing reads, including wild type. C-to-T conversions or C-to-A/G conversions were scored in a 40 bp region including 10 bp upstream and 10 bp downstream of the 20 bp sgRNA target sequence. Any sequencing methods (e.g., NGS) that allow reading of sequences diverged from the wild-type alignment may be used. In some embodiments, the method causes at least 50%, at least 55%, at least 60%, at least 65%, at least 70%, at least 75%, at least 80%, at least 85%, at least 90%, at least 95%, at least 96%, at least 97%, at least 98%, or at least 99% C-to-T conversion relative to the total edits in the target sequence.

[0452] In some embodiments, the ratio of C-to-T conversion to unintended edits is larger than 1:1. As used herein, an “unintended edit” is any edit in the target region that is not a C-to-T conversion. In some embodiments, the ratio of C-to-T conversion to unintended edits is larger than 2:1, larger than 3:1, larger than 4:1, larger than 5:1, larger than 6:1, larger than 7:1, or larger than 8:1. In some embodiments, the ratio of C-to-T conversion to unintended edits is from 2:1 to 99:1. In some embodiments, the ratio of C-to-T conversion to unintended edits is 2:1, 3:1, 4:1, 5:1, 6:1, 7:1, or 8:1.

[0453] In some embodiments, the method causes the A3A to make a base edit corresponding to any one of positions −1 to 10 relative to the 5′ end of the guide sequence.

[0454] In some embodiments, the method causes the A3A to make a base edit at a position 1, 2, 3, 4, 5, 6, 7, 8, 9, or 10 nucleotides from the 5′ end of the guide sequence.

[0455] In some embodiments, the nickase is a SpyCas9 nickase, and the method causes the cytidine deaminase to make a base edit at a cytidine present at position 1, 2, 3, 4, 5, 6, 7, 8, 9, 10, or 11 nucleotides from the 5′ end of the guide sequence.

[0456] In some embodiments, the nickase is a NmeCas9 nickase, and the method causes the cytidine deaminase to make a base edit at a cytidine present at position 4, 5, 6, 7, 8, 9, 10, 11, 12, 13, 14, 15, 16, 17, 18, 19, or 20 nucleotides from the 5′ end of the guide sequence.

[0457] In some embodiments, the composition comprises a first mRNA comprising a first open reading frame encoding a polypeptide comprising an A3A and an RNA-guided nickase, and a second mRNA comprising a second open reading frame encoding a uracil glycosylase inhibitor (UGI), and a gRNA; and the first mRNA, the second mRNA, and the gRNA if present, delivered at a ratio of about 6:2:3 (w:w:w). In some embodiments, the target gene is in a subject, such as a mammal, such as a human.

[0458] In some embodiments, methods are provided for modifying a target gene comprising delivering to a cell a first mRNA comprising a first open reading frame encoding a first polypeptide comprising a cytidine deaminase (e.g., an APOBEC3A deaminase (A3A)) and an RNA-guided nickase, a second mRNA comprising a second open reading frame encoding a uracil glycosylase inhibitor (UGI), wherein the second mRNA is different from the first mRNA, and at least one guide RNA (gRNA).

[0459] In some embodiments, methods are provided for modifying a target gene in a cell, comprising delivering to the cell one or more lipid nucleic acid assembly compositions, optionally lipid nanoparticles, comprising: (a) a first mRNA comprising a first open reading frame encoding a polypeptide comprising a cytidine deaminase (e.g., an APOBEC3A deaminase (A3A)) and an RNA-guided nickase; (b) a second mRNA comprising a second open reading frame encoding a uracil glycosylase inhibitor (UGI); and (c) one or more guide RNAs. In some embodiments, the one or more guide RNAs are each in separate lipid nucleic acid assembly compositions.

[0460] In some embodiments, methods are provided for modifying a target gene in a cell, comprising delivering to the cell one or more lipid nucleic acid assembly compositions, optionally lipid nanoparticles, comprising: (a) a first mRNA comprising a first open reading frame encoding a polypeptide comprising a cytidine deaminase (e.g., an APOBEC3A deaminase (A3A)) and an RNA-guided nickase; (b) a second mRNA comprising a second open reading frame encoding a uracil glycosylase inhibitor (UGI); and (c) one or more guide RNAs, wherein the method comprises one gRNA that targets a gene that reduces or eliminates MHC class I expression on the surface of a cell, and/or one gRNA that targets a gene that reduces or eliminates MHC class II expression on the surface of a cell, and/or one gRNA that targets a gene that reduces or eliminates endogenous TCR expression.

[0461] In some embodiments, methods are provided for modifying a target gene in a cell, comprising delivering to the cell one or more lipid nucleic acid assembly compositions, optionally lipid nanoparticles, comprising: (a) a first mRNA comprising a first open reading frame encoding a polypeptide comprising a cytidine deaminase (e.g., an APOBEC3A deaminase (A3A)) and an RNA-guided nickase; (b) a second mRNA comprising a second open reading frame encoding a uracil glycosylase inhibitor (UGI); and (c) one or more guide RNAs, wherein the method comprises at least two gRNAs selected from: one gRNA that targets a gene that reduces or eliminates MHC class I expression on the surface of a cell, one gRNA that targets a gene that reduces or eliminates MHC class II expression on the surface of a cell, and one gRNA that targets a gene that reduces or eliminates endogenous TCR expression.

[0462] In some embodiments, methods are provided for modifying a target gene in a cell, comprising delivering to the cell one or more lipid nucleic acid assembly compositions, optionally lipid nanoparticles, comprising: (a) a first mRNA comprising a first open reading frame encoding a polypeptide comprising a cytidine deaminase (e.g., an APOBEC3A deaminase (A3A)) and an RNA-guided nickase; (b) a second mRNA comprising a second open reading frame encoding a uracil glycosylase inhibitor (UGI); and (c) one or more guide RNAs, wherein the method comprises one gRNA that targets a gene that reduces or eliminates MHC class I expression on the surface of a cell, one gRNA that targets a gene that reduces or eliminates MHC class II expression on the surface of a cell, and one gRNA that targets a gene that reduces or eliminates endogenous TCR expression.

[0463] In some embodiments, methods are provided for modifying a target gene in a cell, comprising delivering to the cell one or more lipid nucleic acid assembly compositions, optionally lipid nanoparticles, comprising: (a) a first mRNA comprising a first open reading frame encoding a polypeptide comprising a cytidine deaminase (e.g., an APOBEC3A deaminase (A3A)) and an RNA-guided nickase; (b) a second mRNA comprising a second open reading frame encoding a uracil glycosylase inhibitor (UGI); and (c) one or more guide RNAs, wherein the method comprises one gRNA that targets a gene that reduces or eliminates expression of HLA-A on the surface of a cell, and/or one gRNA that targets a gene that reduces or eliminates MHC class II expression on the surface of a cell, and/or one gRNA that targets a gene that reduces or eliminates endogenous TCR expression.

[0464] In some embodiments, methods are provided for modifying a target gene in a cell, comprising delivering to the cell one or more lipid nucleic acid assembly compositions, optionally lipid nanoparticles, comprising: (a) a first mRNA comprising a first open reading frame encoding a polypeptide comprising a cytidine deaminase (e.g., an APOBEC3A deaminase (A3A)) and an RNA-guided nickase; (b) a second mRNA comprising a second open reading frame encoding a uracil glycosylase inhibitor (UGI); and (c) one or more guide RNAs, wherein the method comprises at least two gRNAs selected from: one gRNA that targets a gene that reduces or eliminates expression of HLA-A on the surface of a cell, one gRNA that targets a gene that reduces or eliminates MHC class II expression on the surface of a cell, and one gRNA that targets a gene that reduces or eliminates endogenous TCR expression.

[0465] In some embodiments, methods are provided for modifying a target gene in a cell, comprising delivering to the cell one or more lipid nucleic acid assembly compositions, optionally lipid nanoparticles, comprising: (a) a first mRNA comprising a first open reading frame encoding a polypeptide comprising a cytidine deaminase (e.g., an APOBEC3A deaminase (A3A)) and an RNA-guided nickase; (b) a second mRNA comprising a second open reading frame encoding a uracil glycosylase inhibitor (UGI); and (c) one or more guide RNAs, wherein the method comprises one gRNA that targets a gene that reduces or eliminates expression of HLA-A on the surface of a cell, one gRNA that targets a gene that reduces or eliminates MHC class II expression on the surface of a cell, and one gRNA that targets a gene that reduces or eliminates endogenous TCR expression.

[0466] In some embodiments, methods are provided for modifying a target gene in a cell, comprising delivering to the cell one or more lipid nucleic acid assembly compositions, optionally lipid nanoparticles, comprising: (a) a first mRNA comprising a first open reading frame encoding a polypeptide comprising a cytidine deaminase (e.g., an APOBEC3A deaminase (A3A)) and an RNA-guided nickase; (b) a second mRNA comprising a second open reading frame encoding a uracil glycosylase inhibitor (UGI); and (c) one or more guide RNAs, wherein the method comprises one gRNA selected from a gRNA that targets TRAC, TRBC, B2M, HLA-A, or CIITA. In some embodiments, one gRNA targets TRAC. In some embodiments, one gRNA targets TRBC. In some embodiments, one gRNA targets B2M. In some embodiments, one gRNA targets HLA-A. In some embodiments, one gRNA targets CIITA.

[0467] In some embodiments, methods are provided for modifying a target gene in a cell, comprising delivering to the cell one or more lipid nucleic acid assembly compositions, optionally lipid nanoparticles, comprising: (a) a first mRNA comprising a first open reading frame encoding a polypeptide comprising a cytidine deaminase (e.g., an APOBEC3A deaminase (A3A)) and an RNA-guided nickase; (b) a second mRNA comprising a second open reading frame encoding a uracil glycosylase inhibitor (UGI); and (c) one or more guide RNAs, wherein the method comprises at least two gRNAs selected from a gRNA that targets TRAC, TRBC, or B2M, wherein the two guide RNAs do not target the same gene. In some embodiments, the gRNAs are each in separate lipid nucleic acid assembly compositions.

[0468] In some embodiments, methods are provided for modifying a target gene in a cell, comprising delivering to the cell one or more lipid nucleic acid assembly compositions, optionally lipid nanoparticles, comprising: (a) a first mRNA comprising a first open reading frame encoding a polypeptide comprising a cytidine deaminase (e.g., an APOBEC3A deaminase (A3A)) and an RNA-guided nickase; (b) a second mRNA comprising a second open reading frame encoding a uracil glycosylase inhibitor (UGI); and (c) one or more guide RNAs, wherein the method comprises at least two gRNAs selected from a gRNA that targets TRAC, TRBC, or HLA-A wherein the two guide RNAs do not target the same gene. In some embodiments, the gRNAs are each in separate lipid nucleic acid assembly compositions.

[0469] In some embodiments, methods are provided for modifying a target gene in a cell, comprising delivering to the cell one or more lipid nucleic acid assembly compositions, optionally lipid nanoparticles, comprising: (a) a first mRNA comprising a first open reading frame encoding a polypeptide comprising a cytidine deaminase (e.g., an APOBEC3A deaminase (A3A)) and an RNA-guided nickase; (b) a second mRNA comprising a second open reading frame encoding a uracil glycosylase inhibitor (UGI); and (c) one or more guide RNAs, wherein the method comprises at least two gRNAs selected from a gRNA that targets TRAC, TRBC, HLA-A, wherein the two guide RNAs do not target the same gene. In some embodiments, the gRNAs are each in separate lipid nucleic acid assembly compositions.

[0470] In some embodiments, methods are provided for modifying a target gene in a cell, comprising delivering to the cell one or more lipid nucleic acid assembly compositions, optionally lipid nanoparticles, comprising: (a) a first mRNA comprising a first open reading frame encoding a polypeptide comprising a cytidine deaminase (e.g., an APOBEC3A deaminase (A3A)) and an RNA-guided nickase; (b) a second mRNA comprising a second open reading frame encoding a uracil glycosylase inhibitor (UGI); and (c) one or more guide RNAs, wherein the method comprises one guide RNA that targets TRAC, and one gRNA that targets TRBC. In some embodiments, the gRNAs are each in separate lipid nucleic acid assembly compositions.

[0471] In some embodiments, methods are provided for modifying a target gene in a cell, comprising delivering to the cell one or more lipid nucleic acid assembly compositions, optionally lipid nanoparticles, comprising: (a) a first mRNA comprising a first open reading frame encoding a polypeptide comprising a cytidine deaminase (e.g., an APOBEC3A deaminase (A3A)) and an RNA-guided nickase; (b) a second mRNA comprising a second open reading frame encoding a uracil glycosylase inhibitor (UGI); and (c) one or more guide RNAs, wherein the method comprises one guide RNA that targets B2M, and one gRNA that targets CIITA. In some embodiments, the gRNAs are each in separate lipid nucleic acid assembly compositions.

[0472] In some embodiments, methods are provided for modifying a target gene in a cell, comprising delivering to the cell one or more lipid nucleic acid assembly compositions, optionally lipid nanoparticles, comprising: (a) a first mRNA comprising a first open reading frame encoding a polypeptide comprising a cytidine deaminase (e.g., an APOBEC3A deaminase (A3A)) and an RNA-guided nickase; (b) a second mRNA comprising a second open reading frame encoding a uracil glycosylase inhibitor (UGI); and (c) one or more guide RNAs, wherein the method comprises one guide RNA that targets HLA-A, and one gRNA that targets CIITA. In some embodiments, the gRNAs are each in separate lipid nucleic acid assembly compositions. In some embodiments, the cell is homozygous for HLA-B and homozygous for HLA-C.

[0473] In some embodiments, methods are provided for modifying a target gene in a cell, comprising delivering to the cell one or more lipid nucleic acid assembly compositions, optionally lipid nanoparticles, comprising: (a) a first mRNA comprising a first open reading frame encoding a polypeptide comprising a cytidine deaminase (e.g., an APOBEC3A deaminase (A3A)) and an RNA-guided nickase; (b) a second mRNA comprising a second open reading frame encoding a uracil glycosylase inhibitor (UGI); and (c) one or more guide RNAs, wherein the method comprises one guide RNA that targets TRAC, and one gRNA that targets TRBC, and one gRNA that targets B2M. In some embodiments, the gRNAs are each in separate lipid nucleic acid assembly compositions.

[0474] In some embodiments, methods are provided for modifying a target gene in a cell, comprising delivering to the cell one or more lipid nucleic acid assembly compositions, optionally lipid nanoparticles, comprising: (a) a first mRNA comprising a first open reading frame encoding a polypeptide comprising a cytidine deaminase (e.g., an APOBEC3A deaminase (A3A)) and an RNA-guided nickase; (b) a second mRNA comprising a second open reading frame encoding a uracil glycosylase inhibitor (UGI); and (c) one or more guide RNAs, wherein the method comprises one guide RNA that targets TRAC, and one gRNA that targets TRBC, and one gRNA that targets HLA-A. In some embodiments, the gRNAs are each in separate lipid nucleic acid assembly compositions. In some embodiments, the cell is homozygous for HLA-B and homozygous for HLA-C.

[0475] In some embodiments, methods are provided for modifying a target gene in a cell, comprising delivering to the cell one or more lipid nucleic acid assembly compositions, optionally lipid nanoparticles, comprising: (a) a first mRNA comprising a first open reading frame encoding a polypeptide comprising a cytidine deaminase (e.g., an APOBEC3A deaminase (A3A)) and an RNA-guided nickase; (b) a second mRNA comprising a second open reading frame encoding a uracil glycosylase inhibitor (UGI); and (c) one or more guide RNAs, wherein the method comprises one guide RNA that targets TRAC, and one gRNA that targets TRBC, one gRNA that targets B2M, and one gRNA that targets CIITA. In some embodiments, the gRNAs are each in separate lipid nucleic acid assembly compositions.

[0476] In some embodiments, methods are provided for modifying a target gene in a cell, comprising delivering to the cell one or more lipid nucleic acid assembly compositions, optionally lipid nanoparticles, comprising: (a) a first mRNA comprising a first open reading frame encoding a polypeptide comprising a cytidine deaminase (e.g., an APOBEC3A deaminase (A3A)) and an RNA-guided nickase; (b) a second mRNA comprising a second open reading frame encoding a uracil glycosylase inhibitor (UGI); and (c) one or more guide RNAs, wherein the method comprises one guide RNA that targets TRAC, and one gRNA that targets TRBC, one gRNA that targets HLA-A, and one gRNA that targets CIITA. In some embodiments, the gRNAs are each in separate lipid nucleic acid assembly compositions. In some embodiments, the cell is homozygous for HLA-B and homozygous for HLA-C.

[0477] In some embodiments, a cell is provided comprising a composition comprising a first mRNA comprising a first open reading frame encoding a polypeptide comprising a cytidine deaminase (e.g., an APOBEC3A deaminase (A3A)) and an RNA-guided nickase, and a second mRNA comprising a second open reading frame encoding a uracil glycosylase inhibitor (UGI), wherein the second mRNA is different from the first mRNA.

[0478] In some embodiments, an engineered cell is provided comprising at least one base edit and/or indel, wherein the base edit and/or indel is made by contacting a cell with a composition comprising a first mRNA comprising a first open reading frame encoding a polypeptide comprising a cytidine deaminase (e.g., an APOBEC3A deaminase (A3A)) and an RNA-guided nickase, and a second mRNA comprising a second open reading frame encoding a uracil glycosylase inhibitor (UGI), wherein the second mRNA is different from the first mRNA.

[0479] In some embodiments the cell is a human cell. In some embodiments the genetically modified cell is referred to as an engineered cell. An engineered cell refers to a cell (or progeny of a cell) comprising an engineered genetic modification, e.g. that has been contacted with a gene editing system and genetically modified by the gene editing system. The terms “engineered cell” and “genetically modified cell” are used interchangeably throughout. The engineered cell may be any of the exemplary cell types disclosed herein. In some embodiments, the cell is an allogeneic cell.

[0480] In some embodiments, the cell is an immune cell. As used herein, “immune cell” refers to a cell of the immune system, including e.g., a lymphocyte (e.g., T cell, B cell, natural killer cell (“NK cell”, and NKT cell, or iNKT cell)), monocyte, macrophage, mast cell, dendritic cell, or granulocyte (e.g., neutrophil, eosinophil, and basophil). In some embodiments, the cell is a primary immune cell. In some embodiments, the immune system cell may be selected from CD3+, CD4+ and CD8+ T cells, regulatory T cells (Tregs), B cells, NK cells, and dendritic cells (DC). In some embodiments, the immune cell is allogeneic. In some embodiments, the cell is a lymphocyte. In some embodiments, the cell is an adaptive immune cell. In some embodiments, the cell is a T cell. In some embodiments, the cell is a B cell. In some embodiments, the cell is a NK cell. In some embodiments, the lymphocyte is allogeneic.

[0481] In some embodiments, the genome editing or modification of the target gene is in vivo. In some embodiments, the genome editing or modification of the target gene is in an isolated or cultured cell.

[0482] In some embodiments, the target gene is in an organ, such as a liver, such as a mammalian liver, such as a human liver. In some embodiments, the target gene is in a liver cell, such as a mammalian liver cell, such as a human liver cell. In some embodiments, the target gene is in a hepatocyte, such as a mammalian hepatocyte, such as a human hepatocyte. In some embodiments, the liver cell or hepatocyte is in situ. In some embodiments, the liver cell or hepatocyte is isolated, e.g., in a culture, such as in a primary culture.

[0483] In some embodiments, the genome editing or modification of the target gene inactivates a splice donor or splice acceptor site.

[0484] Also provided are methods corresponding to the uses disclosed herein, which comprise administering the nucleic acid (e.g., mRNA), polypeptide, composition, or lipid nucleic acid assembly composition disclosed herein to a subject or contacting a cell such as those described above with the nucleic acid (e.g., mRNA), polypeptide, composition, or lipid nucleic acid assembly composition disclosed herein.

[0485] In some embodiments the nucleic acid (e.g., mRNA), polypeptide, composition, or lipid nucleic acid assembly composition disclosed herein is administered intravenously for any of the uses discussed above concerning organisms, organs, or cells in situ.

[0486] In any of the foregoing embodiments involving a subject, the subject can be mammalian. In any of the foregoing embodiments involving a subject, the subject can be human. In any of the foregoing embodiments involving a subject, the subject can be a cow, pig, monkey, sheep, dog, cat, fish, or poultry.

[0487] In some embodiments, the nucleic acid (e.g., mRNA), polypeptide, composition, or lipid nucleic acid assembly composition disclosed herein is administered intravenously or for intravenous administration.

[0488] In some embodiments, the genome editing or modification of the target gene knocks down expression of the target gene. In some embodiments, the genome editing or modification of the target gene knocks down expression of the target gene by at least 50%, 55%, 60%, 65%, 70%, 75%, or 80%. In some embodiments, the genome editing or modification of the target gene produces a missense mutation in the gene.

[0489] In some embodiments, a single administration of a nucleic acid (e.g., mRNA), polypeptide, composition, or lipid nucleic acid assembly composition disclosed herein is sufficient to knock down expression of the target gene product. In some embodiments, a single administration of a nucleic acid (e.g., mRNA), polypeptide, composition, or lipid nucleic acid assembly composition disclosed herein is sufficient to knock out expression of the target gene product. In other embodiments, more than one administration of a nucleic acid (e.g., mRNA), polypeptide, composition, or lipid nucleic acid assembly composition disclosed herein may be beneficial to maximize editing via cumulative effects.

[0490] In some embodiments, the efficacy of treatment with a nucleic acid (e.g., mRNA), polypeptide, composition, or lipid nucleic acid assembly composition disclosed herein is seen at 1 year, 2 years, 3 years, 4 years, 5 years, or 10 years after delivery.

[0491] In some embodiments, treatment slows or halts disease progression.

[0492] In some embodiments, treatment results in improvement, stabilization, or slowing of change in organ function or symptoms of disease of an organ.

[0493] In some embodiments, efficacy of treatment is measured by increased survival time of the subject.

[0494] 1. Exemplary Guide RNAs, Compositions, Methods, and Engineered Cells for TRAC and TRBC Editing

[0495] The disclosure provides a guide RNA that target TRAC. Guide sequences targeting the TRAC gene are shown in Table 5A at SEQ ID NOs: 706-721.

[0496] The disclosure provides a guide RNA that target TRBC. Guide sequences targeting the TRBC gene are shown in Table 5B at SEQ ID NOs: 618-669.

[0497] In some embodiments, the guide sequences are complementary to the corresponding genomic region shown in the tables below, according to coordinates from human reference genome hg38. Guide sequences of further embodiments may be complementary to sequences in the close vicinity of the genomic coordinate listed in any of Tables 5A and 5B. For example, guide sequences of further embodiments may be complementary to sequences that comprise 15 consecutive nucleotides±10 nucleotides of a genomic coordinate listed in any of Tables 5A an 5B.

[0498] As described in the preceding sections, each of the guide sequences shown in Table 5A and Table 5B may further comprise additional nucleotides to form a crRNA, e.g., with the following exemplary nucleotide sequence following the guide sequence at its 3′ end: GUUUUAGAGCUAUGCUGUUUUG (SEQ ID NO: 139) in 5′ to 3′ orientation. In the case of a sgRNA, the guide sequences may further comprise additional nucleotides to form a sgRNA, e.g., with the following exemplary nucleotide sequence following the 3′ end of the guide sequence: GUUUUAGAGCUAGAAAUAGCAAGUUAAAAUAAGGCUAGUCCGUUAUCAACUU GAAAAAGUGGCACCGAGUCGGUGCUUUU (SEQ ID NO: 140) in 5′ to 3′ orientation. The guide sequences may further comprise additional nucleotides to form a sgRNA, e.g.,

[0499] In some embodiments, the sgRNA comprises the modification pattern shown below in SEQ ID NO: 141, where N is any natural or non-natural nucleotide, and where the totality of the N's comprise a guide sequence as described herein and the modified sgRNA comprises the following sequence: mN*mN*mN*NNNNNNNNNNNNNNNNNGUUUUAGAmGmCmUmAmGmAmAmAmU mAmGmCAAGUUAAAAUAAGGCUAGUCCGUUAUCAmAmCmUmUmGmAmAmAm AmAmGmUmGmGmCmAmCmCmGmAmGmUmCmGmGmUmGmCmU*mU*mU*mU (SEQ ID NO: 141), where “N” may be any natural or non-natural nucleotide. For example, encompassed herein is SEQ ID NO: 141, where the N's are replaced with any of the guide sequences disclosed herein. The modifications remain as shown in SEQ ID NO: 141 despite the substitution of N's for the nucleotides of a guide. That is, although the nucleotides of the guide replace the “N's”, the first three nucleotides are 2′OMe modified and there are phosphorothioate linkages between the first and second nucleotides, the second and third nucleotides and the third and fourth nucleotides.

[0500] In some embodiments, the gRNA targeting TRAC comprises a guide sequence chosen from: i) SEQ ID NOs: 706-721; ii) at least 17, 18, 19, or 20 contiguous nucleotides of a sequence selected from SEQ ID NOs: 706-721; iii) a guide sequence at least 95%, 90%, or 85% identical to a sequence selected from SEQ ID NOs: 706-721; iv) a sequence that comprises 10 contiguous nucleotides±10 nucleotides of a genomic coordinate listed in Table 5A; v) at least 17, 18, 19, or 20 contiguous nucleotides of a sequence from (iv); or vi) a guide sequence that is at least 95%, 90%, or 85% identical to a sequence selected from (v).

TABLE 5A
TRAC guide sequences, guide RNA sequences, and chromosomal
coordinates

| | SEQ ID | | | | |
|---|---|---|---|---|---|
| | NO to the | | Exemplary Full | | Genomic |
| Guide | Guide | Guide | Sequence (SEQ ID | Exemplary Mod Sequence | Coordinates |
| ID | Sequence | Sequence | NOS: 747-762) | (SEQ ID NOS: 853-868) | (hg38) |
| G016019 | 706 | AACAAA | AACAAAUGUGU | mA*mA*mC*AAAUGUGUC | chr14: |
| | | UGUGUC | CACAAAGUAGU | ACAAAGUAGUUUUAGAm | 22547596- |
| | | ACAAAG | UUUAGAGCUAG | GmCmUmAmGmAmAmAm | 22547616 |
| | | UA | AAAUAGCAAGU | UmAmGmCAAGUUAAAAU | |
| | | | UAAAAUAAGGC | AAGGCUAGUCCGUUAUC | |
| | | | UAGUCCGUUAU | AmAmCmUmUmGmAmAm | |
| | | | CAACUUGAAAA | AmAmAmGmUmGmGmCm | |
| | | | AGUGGCACCGA | AmCmCmGmAmGmUmCm | |
| | | | GUCGGUGCUUU | GmGmUmGmCmU*mU*mU | |
| | | | U | *mU | |
| G016016 | 707 | UUUCAA | UUUCAAAACCU | mU*mU*mU*CAAAACCUG | chr14: |
| | | AACCUG | GUCAGUGAUGU | UCAGUGAUGUUUUAGAm | 22550570- |
| | | UCAGUG | UUUAGAGCUAG | GmCmUmAmGmAmAmAm | 22550590 |
| | | AU | AAAUAGCAAGU | UmAmGmCAAGUUAAAAU | |
| | | | UAAAAUAAGGC | AAGGCUAGUCCGUUAUC | |
| | | | UAGUCCGUUAU | AmAmCmUmUmGmAmAm | |
| | | | CAACUUGAAAA | AmAmAmGmUmGmGmCm | |
| | | | AGUGGCACCGA | AmCmCmGmAmGmUmCm | |
| | | | GUCGGUGCUUU | GmGmUmGmCmU*mU*mU | |
| | | | U | *mU | |
| G016026 | 708 | CUUACC | CUUACCUGGGC | mC*mU*mU*ACCUGGGCU | chr14: |
| | | UGGGCU | UGGGGAAGAGU | GGGGAAGAGUUUUAGAm | 22547763- |
| | | GGGGA | UUUAGAGCUAG | GmCmUmAmGmAmAmAm | 22547783 |
| | | AGA | AAAUAGCAAGU | UmAmGmCAAGUUAAAAU | |
| | | | UAAAAUAAGGC | AAGGCUAGUCCGUUAUC | |
| | | | UAGUCCGUUAU | AmAmCmUmUmGmAmAm | |
| | | | CAACUUGAAAA | AmAmAmGmUmGmGmCm | |
| | | | AGUGGCACCGA | AmCmCmGmAmGmUmCm | |
| | | | GUCGGUGCUUU | GmGmUmGmCmU*mU*mU | |
| | | | U | *mU | |
| G016013 | 709 | CCGAAU | CCGAAUCCUCCU | mC*mC*mG*AAUCCUCCU | chr14: |
| | | CCUCCU | CCUGAAAGGUU | CCUGAAAGGUUUUAGAm | 22550596- |
| | | CCUGAA | UUAGAGCUAGA | GmCmUmAmGmAmAmAm | 22550616 |
| | | AG | AAUAGCAAGUU | UmAmGmCAAGUUAAAAU | |
| | | | AAAAUAAGGCU | AAGGCUAGUCCGUUAUC | |
| | | | AGUCCGUUAUC | AmAmCmUmUmGmAmAm | |
| | | | AACUUGAAAAA | AmAmAmGmUmGmGmCm | |
| | | | GUGGCACCGAG | AmCmCmGmAmGmUmCm | |
| | | | UCGGUGCUUUU | GmGmUmGmCmU*mU*mU | |
| | | | | *mU | |
| G016022 | 710 | CUGACA | CUGACAGGUUU | mC*mU*mG*ACAGGUUUU | chr14: |
| | | GGUUU | UGAAAGUUUGU | GAAAGUUUGUUUUAGAm | 22550566- |
| | | UGAAA | UUUAGAGCUAG | GmCmUmAmGmAmAmAm | 22550586 |
| | | GUUU | AAAUAGCAAGU | UmAmGmCAAGUUAAAAU | |
| | | | UAAAAUAAGGC | AAGGCUAGUCCGUUAUC | |
| | | | UAGUCCGUUAU | AmAmCmUmUmGmAmAm | |
| | | | CAACUUGAAAA | AmAmAmGmUmGmGmCm | |
| | | | AGUGGCACCGA | AmCmCmGmAmGmUmCm | |
| | | | GUCGGUGCUUU | GmGmUmGmCmU*mU*mU | |
| | | | U | *mU | |
| G016023 | 711 | CUGGGG | CUGGGGAAGAA | mC*mU*mG*GGGAAGAA | chr14: |
| | | AAGAA | GGUGUCUUCGU | GGUGUCUUCGUUUUAGA | 22547753- |
| | | GGUGUC | UUUAGAGCUAG | mGmCmUmAmGmAmAmA | 22547773 |
| | | UUC | AAAUAGCAAGU | mUmAmGmCAAGUUAAA | |
| | | | UAAAAUAAGGC | AUAAGGCUAGUCCGUUA | |
| | | | UAGUCCGUUAU | UCAmAmCmUmUmGmAm | |
| | | | CAACUUGAAAA | AmAmAmAmGmUmGmGm | |
| | | | AGUGGCACCGA | CmAmCmCmGmAmGmUm | |
| | | | GUCGGUGCUUU | CmGmGmUmGmCmU*mU* | |
| | | | U | mU*mU | |
| G016010 | 712 | UCCUCC | UCCUCCUCCUGA | mU*mC*mC*UCCUCCUGA | chr14: |
| | | UCCUGA | AAGUGGCCGUU | AAGUGGCCGUUUUAGAm | 22550601- |
| | | AAGUG | UUAGAGCUAGA | GmCmUmAmGmAmAmAm | 22550621 |
| | | GCC | AAUAGCAAGUU | UmAmGmCAAGUUAAAAU | |
| | | | AAAAUAAGGCU | AAGGCUAGUCCGUUAUC | |
| | | | AGUCCGUUAUC | AmAmCmUmUmGmAmAm | |
| | | | AACUUGAAAAA | AmAmAmGmUmGmGmCm | |
| | | | GUGGCACCGAG | AmCmCmGmAmGmUmCm | |
| | | | UCGGUGCUUUU | GmGmUmGmCmU*mU*mU | |
| | | | | *mU | |
| G016014 | 713 | CCACUU | CCACUUUCAGG | mC*mC*mA*CUUUCAGGA | chr14: |
| | | UCAGGA | AGGAGGAUUGU | GGAGGAUUGUUUUAGAm | 22550599- |
| | | GGAGG | UUUAGAGCUAG | GmCmUmAmGmAmAmAm | 22550619 |
| | | AUU | AAAUAGCAAGU | UmAmGmCAAGUUAAAAU | |
| | | | UAAAAUAAGGC | AAGGCUAGUCCGUUAUC | |
| | | | UAGUCCGUUAU | AmAmCmUmUmGmAmAm | |
| | | | CAACUUGAAAA | AmAmAmGmUmGmGmCm | |
| | | | AGUGGCACCGA | AmCmCmGmAmGmUmCm | |
| | | | GUCGGUGCUUU | GmGmUmGmCmU*mU*mU | |
| | | | U | *mU | |
| G016020 | 714 | AUUUG | AUUUGUUUGAG | mA*mU*mU*UGUUUGAG | chr14: |
| | | UUUGA | AAUCAAAAUGU | AAUCAAAAUGUUUUAGA | 22547583- |
| | | GAAUCA | UUUAGAGCUAG | mGmCmUmAmGmAmAmA | 22547603 |
| | | AAAU | AAAUAGCAAGU | mUmAmGmCAAGUUAAA | |
| | | | UAAAAUAAGGC | AUAAGGCUAGUCCGUUA | |
| | | | UAGUCCGUUAU | UCAmAmCmUmUmGmAm | |
| | | | CAACUUGAAAA | AmAmAmAmGmUmGmGm | |
| | | | AGUGGCACCGA | CmAmCmCmGmAmGmUm | |
| | | | GUCGGUGCUUU | CmGmGmUmGmCmU*mU* | |
| | | | U | mU*mU | |
| G015998 | 715 | CUUCAA | CUUCAAGAGCA | mC*mU*mU*CAAGAGCAA | chr14: |
| | | GAGCAA | ACAGUGCUGGU | CAGUGCUGGUUUUAGAm | 22547671- |
| | | CAGUGC | UUUAGAGCUAG | GmCmUmAmGmAmAmAm | 22547691 |
| | | UG | AAAUAGCAAGU | UmAmGmCAAGUUAAAAU | |
| | | | UAAAAUAAGGC | AAGGCUAGUCCGUUAUC | |
| | | | UAGUCCGUUAU | AmAmCmUmUmGmAmAm | |
| | | | CAACUUGAAAA | AmAmAmGmUmGmGmCm | |
| | | | AGUGGCACCGA | AmCmCmGmAmGmUmCm | |
| | | | GUCGGUGCUUU | GmGmUmGmCmU*mU*mU | |
| | | | U | *mU | |
| G016025 | 716 | AGCUGC | AGCUGCCCUUA | mA*mG*mC*UGCCCUUAC | chr14: |
| | | CCUUAC | CCUGGGCUGGU | CUGGGCUGGUUUUAGAm | 22547770- |
| | | CUGGGC | UUUAGAGCUAG | GmCmUmAmGmAmAmAm | 22547790 |
| | | UG | AAAUAGCAAGU | UmAmGmCAAGUUAAAAU | |
| | | | UAAAAUAAGGC | AAGGCUAGUCCGUUAUC | |
| | | | UAGUCCGUUAU | AmAmCmUmUmGmAmAm | |
| | | | CAACUUGAAAA | AmAmAmGmUmGmGmCm | |
| | | | AGUGGCACCGA | AmCmCmGmAmGmUmCm | |
| | | | GUCGGUGCUUU | GmGmUmGmCmU*mU*mU | |
| | | | U | *mU | |
| G015997 | 717 | AGAGCA | AGAGCAACAGU | mA*mG*mA*GCAACAGUG | chr14: |
| | | ACAGUG | GCUGUGGCCGU | CUGUGGCCGUUUUAGAm | 22547676- |
| | | CUGUGG | UUUAGAGCUAG | GmCmUmAmGmAmAmAm | 22547696 |
| | | CC | AAAUAGCAAGU | UmAmGmCAAGUUAAAAU | |
| | | | UAAAAUAAGGC | AAGGCUAGUCCGUUAUC | |
| | | | UAGUCCGUUAU | AmAmCmUmUmGmAmAm | |
| | | | CAACUUGAAAA | AmAmAmGmUmGmGmCm | |
| | | | AGUGGCACCGA | AmCmCmGmAmGmUmCm | |
| | | | GUCGGUGCUUU | GmGmUmGmCmU*mU*mU | |
| | | | U | *mU | |
| G016029 | 718 | AAAGCU | AAAGCUGCCCU | mA*mA*mA*GCUGCCCUU | chr14: |
| | | GCCCUU | UACCUGGGCGU | ACCUGGGCGUUUUAGAm | 22547772- |
| | | ACCUGG | UUUAGAGCUAG | GmCmUmAmGmAmAmAm | 22547792 |
| | | GC | AAAUAGCAAGU | UmAmGmCAAGUUAAAAU | |
| | | | UAAAAUAAGGC | AAGGCUAGUCCGUUAUC | |
| | | | UAGUCCGUUAU | AmAmCmUmUmGmAmAm | |
| | | | CAACUUGAAAA | AmAmAmGmUmGmGmCm | |
| | | | AGUGGCACCGA | AmCmCmGmAmGmUmCm | |
| | | | GUCGGUGCUUU | GmGmUmGmCmU*mU*mU | |
| | | | U | *mU | |
| G016028 | 719 | AAGCUG | AAGCUGCCCUU | mA*mA*mG*CUGCCCUUA | chr14: |
| | | CCCUUA | ACCUGGGCUGU | CCUGGGCUGUUUUAGAm | 22547771- |
| | | CCUGGG | UUUAGAGCUAG | GmCmUmAmGmAmAmAm | 22547791 |
| | | CU | AAAUAGCAAGU | UmAmGmCAAGUUAAAAU | |
| | | | UAAAAUAAGGC | AAGGCUAGUCCGUUAUC | |
| | | | UAGUCCGUUAU | AmAmCmUmUmGmAmAm | |
| | | | CAACUUGAAAA | AmAmAmGmUmGmGmCm | |
| | | | AGUGGCACCGA | AmCmCmGmAmGmUmCm | |
| | | | GUCGGUGCUUU | GmGmUmGmCmU*mU*mU | |
| | | | U | *mU | |
| G016021 | 720 | UGGAA | UGGAAUAAUGC | mU*mG*mG*AAUAAUGC | chr14: |
| | | UAAUGC | UGUUGUUGAGU | UGUUGUUGAGUUUUAGA | 22547733- |
| | | UGUUG | UUUAGAGCUAG | mGmCmUmAmGmAmAmA | 22547753 |
| | | UUGA | AAAUAGCAAGU | mUmAmGmCAAGUUAAA | |
| | | | UAAAAUAAGGC | AUAAGGCUAGUCCGUUA | |
| | | | UAGUCCGUUAU | UCAmAmCmUmUmGmAm | |
| | | | CAACUUGAAAA | AmAmAmAmGmUmGmGm | |
| | | | AGUGGCACCGA | CmAmCmCmGmAmGmUm | |
| | | | GUCGGUGCUUU | CmGmGmUmGmCmU*mU* | |
| | | | U | mU*mU | |
| G016015 | 721 | CACCAA | CACCAAAGCUG | mC*mA*mC*CAAAGCUGC | chr14: |
| | | AGCUGC | CCCUUACCUGU | CCUUACCUGUUUUAGAm | 22547776- |
| | | CCUUAC | UUUAGAGCUAG | GmCmUmAmGmAmAmAm | 22547796 |
| | | CU | AAAUAGCAAGU | UmAmGmCAAGUUAAAAU | |
| | | | UAAAAUAAGGC | AAGGCUAGUCCGUUAUC | |
| | | | UAGUCCGUUAU | AmAmCmUmUmGmAmAm | |
| | | | CAACUUGAAAA | AmAmAmGmUmGmGmCm | |
| | | | AGUGGCACCGA | AmCmCmGmAmGmUmCm | |
| | | | GUCGGUGCUUU | GmGmUmGmCmU*mU*mU | |
| | | | U | *mU | |

[0501] In some embodiments, the guide sequence comprises SEQ ID NO: 706. In some embodiments, the guide sequence comprises SEQ ID NO: 707. In some embodiments, the guide sequence comprises SEQ ID NO: 708. In some embodiments, the guide sequence comprises SEQ ID NO: 709. In some embodiments, the guide sequence comprises SEQ ID NO: 710. In some embodiments, the guide sequence comprises SEQ ID NO: 711. In some embodiments, the guide sequence comprises SEQ ID NO: 712. In some embodiments, the guide sequence comprises SEQ ID NO: 713. In some embodiments, the guide sequence comprises SEQ ID NO: 714. In some embodiments, the guide sequence comprises SEQ ID NO: 715. In some embodiments, the guide sequence comprises SEQ ID NO: 716. In some embodiments, the guide sequence comprises SEQ ID NO: 717. In some embodiments, the guide sequence comprises SEQ ID NO: 718. In some embodiments, the guide sequence comprises SEQ ID NO: 719. In some embodiments, the guide sequence comprises SEQ ID NO: 720. In some embodiments, the guide sequence comprises SEQ ID NO: 721.

[0502] In some embodiments, the gRNA targeting TRBC comprises a guide sequence chosen from: i) SEQ ID NOs: 618-669; ii) at least 17, 18, 19, or 20 contiguous nucleotides of a sequence selected from SEQ ID NOs: 618-669; iii) a guide sequence at least 95%, 90%, or 85% identical to a sequence selected from SEQ ID NOs: 618-669; iv) a sequence that comprises 10 contiguous nucleotides±10 nucleotides of a genomic coordinate listed in Table 5B; v) at least 17, 18, 19, or 20 contiguous nucleotides of a sequence from (iv); or vi) a guide sequence that is at least 95%, 90%, or 85% identical to a sequence selected from (v).

TABLE 5B
TRBC guide sequences, guide RNA sequences, and chromosomal
coordinates

| | SEQ ID | | Exemplary Full | | |
|---|---|---|---|---|---|
| | NO to the | | Sequence (SEQ | | Genomic |
| Guide | Guide | Guide | ID NOS: 1024- | Exemplary Mod Sequence | Coordinates |
| ID | Sequence | Sequence | 1075) | (SEQ ID NOS: 801-852) | (hg38) |
| G016200 | 618 | CCACAC | CCACACCCAAA | mC*mC*mA*CACCCAAA | chr7: |
| | | CCAAAA | AGGCCACACGU | AGGCCACACGUUUUAG | 142791757- |
| | | GGCCAC | UUUAGAGCUAG | AmGmCmUmAmGmAmAm | 142791777 |
| | | AC | AAAUAGCAAGU | AmUmAmGmCAAGUUAA | chr7: |
| | | | UAAAAUAAGGC | AAUAAGGCUAGUCCGU | 142801104- |
| | | | UAGUCCGUUAU | UAUCAmAmCmUmUmGm | 142801124 |
| | | | CAACUUGAAAA | AmAmAmAmAmGmUmG | |
| | | | AGUGGCACCGA | mGmCmAmCmCmGmAmG | |
| | | | GUCGGUGCUUU | mUmCmGmGmUmGmCmU | |
| | | | U | *mU*mU*mU | |
| G016174 | 619 | CCCACC | CCCACCAGCUC | mC*mC*mC*ACCAGCUC | chr7: |
| | | AGCUCA | AGCUCCACGGU | AGCUCCACGGUUUUAG | 142791811- |
| | | GCUCCA | UUUAGAGCUAG | AmGmCmUmAmGmAmAm | 142791831; |
| | | CG | AAAUAGCAAGU | AmUmAmGmCAAGUUAA | chr7: |
| | | | UAAAAUAAGGC | AAUAAGGCUAGUCCGU | 142801158- |
| | | | UAGUCCGUUAU | UAUCAmAmCmUmUmGm | 142801178 |
| | | | CAACUUGAAAA | AmAmAmAmAmGmUmG | |
| | | | AGUGGCACCGA | mGmCmAmCmCmGmAmG | |
| | | | GUCGGUGCUUU | mUmCmGmGmUmGmCmU | |
| | | | U | *mU*mU*mU | |
| G016263 | 620 | UCCCUA | UCCCUAGCAGG | mU*mC*mC*CUAGCAGG | chr7: |
| | | GCAGGA | AUCUCAUAGGU | AUCUCAUAGGUUUUAG | 142792728- |
| | | UCUCAU | UUUAGAGCUAG | AmGmCmUmAmGmAmAm | 142792748 |
| | | AG | AAAUAGCAAGU | AmUmAmGmCAAGUUAA | |
| | | | UAAAAUAAGGC | AAUAAGGCUAGUCCGU | |
| | | | UAGUCCGUUAU | UAUCAmAmCmUmUmGm | |
| | | | CAACUUGAAAA | AmAmAmAmAmGmUmG | |
| | | | AGUGGCACCGA | mGmCmAmCmCmGmAmG | |
| | | | GUCGGUGCUUU | mUmCmGmGmUmGmCmU | |
| | | | U | *mU*mU*mU | |
| G016270 | 621 | GGCUCA | GGCUCAAACAC | mG*mG*mC*UCAAACAC | chr7: |
| | | AACACA | AGCGACCUCGU | AGCGACCUCGUUUUAG | 142791719- |
| | | GCGACC | UUUAGAGCUAG | AmGmCmUmAmGmAmAm | 142791739 |
| | | UC | AAAUAGCAAGU | AmUmAmGmCAAGUUAA | |
| | | | UAAAAUAAGGC | AAUAAGGCUAGUCCGU | |
| | | | UAGUCCGUUAU | UAUCAmAmCmUmUmGm | |
| | | | CAACUUGAAAA | AmAmAmAmAmGmUmG | |
| | | | AGUGGCACCGA | mGmCmAmCmCmGmAmG | |
| | | | GUCGGUGCUUU | mUmCmGmGmUmGmCmU | |
| | | | U | *mU*mU*mU | |
| G016212 | 622 | GGCACA | GGCACACCAGU | mG*mG*mC*ACACCAGU | chr7: |
| | | CCAGUG | GUGGCCUUUGU | GUGGCCUUUGUUUUAG | 142791766- |
| | | UGGCCU | UUUAGAGCUAG | AmGmCmUmAmGmAmAm | 142791786; |
| | | UU | AAAUAGCAAGU | AmUmAmGmCAAGUUAA | chr7: |
| | | | UAAAAUAAGGC | AAUAAGGCUAGUCCGU | 142801113- |
| | | | UAGUCCGUUAU | UAUCAmAmCmUmUmGm | 142801133 |
| | | | CAACUUGAAAA | AmAmAmAmAmGmUmG | |
| | | | AGUGGCACCGA | mGmCmAmCmCmGmAmG | |
| | | | GUCGGUGCUUU | mUmCmGmGmUmGmCmU | |
| | | | U | *mU*mU*mU | |
| G016207 | 623 | AGGUG | AGGUGGCCGAG | mA*mG*mG*UGGCCGAG | chr7: |
| | | GCCGAG | ACCCUCAGGGU | ACCCUCAGGGUUUUAG | 142791928- |
| | | ACCCUC | UUUAGAGCUAG | AmGmCmUmAmGmAmAm | 142791948; |
| | | AGG | AAAUAGCAAGU | AmUmAmGmCAAGUUAA | chr7: |
| | | | UAAAAUAAGGC | AAUAAGGCUAGUCCGU | 142801275- |
| | | | UAGUCCGUUAU | UAUCAmAmCmUmUmGm | 142801295 |
| | | | CAACUUGAAAA | AmAmAmAmAmGmUmG | |
| | | | AGUGGCACCGA | mGmCmAmCmCmGmAmG | |
| | | | GUCGGUGCUUU | mUmCmGmGmUmGmCmU | |
| | | | U | *mU*mU*mU | |
| G016205 | 624 | ACCUGC | ACCUGCUCUAC | mA*mC*mC*UGCUCUAC | chr7: |
| | | UCUACC | CCCAGGCCUGU | CCCAGGCCUGUUUUAG | 142792062- |
| | | CCAGGC | UUUAGAGCUAG | AmGmCmUmAmGmAmAm | 142792082; |
| | | CU | AAAUAGCAAGU | AmUmAmGmCAAGUUAA | chr7: |
| | | | UAAAAUAAGGC | AAUAAGGCUAGUCCGU | 142801409- |
| | | | UAGUCCGUUAU | UAUCAmAmCmUmUmGm | 142801429 |
| | | | CAACUUGAAAA | AmAmAmAmAmGmUmG | |
| | | | AGUGGCACCGA | mGmCmAmCmCmGmAmG | |
| | | | GUCGGUGCUUU | mUmCmGmGmUmGmCmU | |
| | | | U | *mU*mU*mU | |
| G016245 | 625 | CAUAGA | CAUAGAGGAUG | mC*mA*mU*AGAGGAUG | chr7: |
| | | GGAUG | GUGGCAGACGU | GUGGCAGACGUUUUAG | 142792713- |
| | | GUGGCA | UUUAGAGCUAG | AmGmCmUmAmGmAmAm | 142792733; |
| | | GAC | AAAUAGCAAGU | AmUmAmGmCAAGUUAA | chr7: |
| | | | UAAAAUAAGGC | AAUAAGGCUAGUCCGU | 142802126- |
| | | | UAGUCCGUUAU | UAUCAmAmCmUmUmGm | 142802146 |
| | | | CAACUUGAAAA | AmAmAmAmAmGmUmG | |
| | | | AGUGGCACCGA | mGmCmAmCmCmGmAmG | |
| | | | GUCGGUGCUUU | mUmCmGmGmUmGmCmU | |
| | | | U | *mU*mU*mU | |
| G016232 | 626 | CCACGU | CCACGUGGAGC | mC*mC*mA*CGUGGAGC | chr7: |
| | | GGAGCU | UGAGCUGGUGU | UGAGCUGGUGUUUUAG | 142791808- |
| | | GAGCUG | UUUAGAGCUAG | AmGmCmUmAmGmAmAm | 142791828; |
| | | GU | AAAUAGCAAGU | AmUmAmGmCAAGUUAA | chr7: |
| | | | UAAAAUAAGGC | AAUAAGGCUAGUCCGU | 142801155- |
| | | | UAGUCCGUUAU | UAUCAmAmCmUmUmGm | 142801175 |
| | | | CAACUUGAAAA | AmAmAmAmAmGmUmG | |
| | | | AGUGGCACCGA | mGmCmAmCmCmGmAmG | |
| | | | GUCGGUGCUUU | mUmCmGmGmUmGmCmU | |
| | | | U | *mU*mU*mU | |
| G016227 | 627 | GGAGA | GGAGAAUGACG | mG*mG*mA*GAAUGACG | chr7: |
| | | AUGACG | AGUGGACCCGU | AGUGGACCCGUUUUAG | 142792003- |
| | | AGUGG | UUUAGAGCUAG | AmGmCmUmAmGmAmAm | 142792023; |
| | | ACCC | AAAUAGCAAGU | AmUmAmGmCAAGUUAA | chr7: |
| | | | UAAAAUAAGGC | AAUAAGGCUAGUCCGU | 142801350- |
| | | | UAGUCCGUUAU | UAUCAmAmCmUmUmGm | 142801370 |
| | | | CAACUUGAAAA | AmAmAmAmAmGmUmG | |
| | | | AGUGGCACCGA | mGmCmAmCmCmGmAmG | |
| | | | GUCGGUGCUUU | mUmCmGmGmUmGmCmU | |
| | | | U | *mU*mU*mU | |
| G016273 | 628 | CCAGUG | CCAGUGUGGCC | mC*mC*mA*GUGUGGCC | chr7: |
| | | UGGCCU | UUUUGGGUGG | UUUUGGGUGGUUUUAG | 142791760- |
| | | UUUGG | UUUUAGAGCUA | AmGmCmUmAmGmAmAm | 142791780 |
| | | GUG | GAAAUAGCAAG | AmUmAmGmCAAGUUAA | |
| | | | UUAAAAUAAG | AAUAAGGCUAGUCCGU | |
| | | | GCUAGUCCGUU | UAUCAmAmCmUmUmGm | |
| | | | AUCAACUUGAA | AmAmAmAmAmGmUmG | |
| | | | AAAGUGGCACC | mGmCmAmCmCmGmAmG | |
| | | | GAGUCGGUGCU | mUmCmGmGmUmGmCmU | |
| | | | UUU | *mU*mU*mU | |
| G016251 | 629 | CAAACA | CAAACACAGCG | mC*mA*mA*ACACAGCG | chr7: |
| | | CAGCGA | ACCUCGGGUGU | ACCUCGGGUGUUUUAG | 142791715- |
| | | CCUCGG | UUUAGAGCUAG | AmGmCmUmAmGmAmAm | 142791735 |
| | | GU | AAAUAGCAAGU | AmUmAmGmCAAGUUAA | |
| | | | UAAAAUAAGGC | AAUAAGGCUAGUCCGU | |
| | | | UAGUCCGUUAU | UAUCAmAmCmUmUmGm | |
| | | | CAACUUGAAAA | AmAmAmAmAmGmUmG | |
| | | | AGUGGCACCGA | mGmCmAmCmCmGmAmG | |
| | | | GUCGGUGCUUU | mUmCmGmGmUmGmCmU | |
| | | | U | *mU*mU*mU | |
| G016276 | 630 | UACCAU | UACCAUGGCCA | mU*mA*mC*CAUGGCCA | chr7: |
| | | GGCCAU | UCAACACAAGU | UCAACACAAGUUUUAG | 142792781- |
| | | CAACAC | UUUAGAGCUAG | AmGmCmUmAmGmAmAm | 142792801 |
| | | AA | AAAUAGCAAGU | AmUmAmGmCAAGUUAA | |
| | | | UAAAAUAAGGC | AAUAAGGCUAGUCCGU | |
| | | | UAGUCCGUUAU | UAUCAmAmCmUmUmGm | |
| | | | CAACUUGAAAA | AmAmAmAmAmGmUmG | |
| | | | AGUGGCACCGA | mGmCmAmCmCmGmAmG | |
| | | | GUCGGUGCUUU | mUmCmGmGmUmGmCmU | |
| | | | U | *mU*mU*mU | |
| G016167 | 631 | GCGCUG | GCGCUGACGAU | mG*mC*mG*CUGACGAU | chr7: |
| | | ACGAUC | CUGGGUGACGU | CUGGGUGACGUUUUAG | 142792040- |
| | | UGGGU | UUUAGAGCUAG | AmGmCmUmAmGmAmAm | 142792060; |
| | | GAC | AAAUAGCAAGU | AmUmAmGmCAAGUUAA | chr7: |
| | | | UAAAAUAAGGC | AAUAAGGCUAGUCCGU | 142801387- |
| | | | UAGUCCGUUAU | UAUCAmAmCmUmUmGm | 142801407 |
| | | | CAACUUGAAAA | AmAmAmAmAmGmUmG | |
| | | | AGUGGCACCGA | mGmCmAmCmCmGmAmG | |
| | | | GUCGGUGCUUU | mUmCmGmGmUmGmCmU | |
| | | | U | *mU*mU*mU | |
| G016253 | 632 | CACGGA | CACGGACCCGC | mC*mA*mC*GGACCCGC | chr7: |
| | | CCCGCA | AGCCCCUCAGU | AGCCCCUCAGUUUUAG | 142791862- |
| | | GCCCCU | UUUAGAGCUAG | AmGmCmUmAmGmAmAm | 142791882 |
| | | CA | AAAUAGCAAGU | AmUmAmGmCAAGUUAA | |
| | | | UAAAAUAAGGC | AAUAAGGCUAGUCCGU | |
| | | | UAGUCCGUUAU | UAUCAmAmCmUmUmGm | |
| | | | CAACUUGAAAA | AmAmAmAmAmGmUmG | |
| | | | AGUGGCACCGA | mGmCmAmCmCmGmAmG | |
| | | | GUCGGUGCUUU | mUmCmGmGmUmGmCmU | |
| | | | U | *mU*mU*mU | |
| G016272 | 633 | UCAAAC | UCAAACACAGC | mU*mC*mA*AACACAGC | chr7: |
| | | ACAGCG | GACCUCGGGGU | GACCUCGGGGUUUUAG | 142791716- |
| | | ACCUCG | UUUAGAGCUAG | AmGmCmUmAmGmAmAm | 142791736 |
| | | GG | AAAUAGCAAGU | AmUmAmGmCAAGUUAA | |
| | | | UAAAAUAAGGC | AAUAAGGCUAGUCCGU | |
| | | | UAGUCCGUUAU | UAUCAmAmCmUmUmGm | |
| | | | CAACUUGAAAA | AmAmAmAmAmGmUmG | |
| | | | AGUGGCACCGA | mGmCmAmCmCmGmAmG | |
| | | | GUCGGUGCUUU | mUmCmGmGmUmGmCmU | |
| | | | U | *mU*mU*mU | |
| G016258 | 634 | CAGGGA | CAGGGAAGAAG | mC*mA*mG*GGAAGAAG | chr7: |
| | | AGAAGC | CCUGUGGCCGU | CCUGUGGCCGUUUUAG | 142791787- |
| | | CUGUGG | UUUAGAGCUAG | AmGmCmUmAmGmAmAm | 142791807 |
| | | CC | AAAUAGCAAGU | AmUmAmGmCAAGUUAA | |
| | | | UAAAAUAAGGC | AAUAAGGCUAGUCCGU | |
| | | | UAGUCCGUUAU | UAUCAmAmCmUmUmGm | |
| | | | CAACUUGAAAA | AmAmAmAmAmGmUmG | |
| | | | AGUGGCACCGA | mGmCmAmCmCmGmAmG | |
| | | | GUCGGUGCUUU | mUmCmGmGmUmGmCmU | |
| | | | U | *mU*mU*mU | |
| G016183 | 635 | CAGUGU | CAGUGUGGCCU | mC*mA*mG*UGUGGCCU | chr7: |
| | | GGCCUU | UUUGGGUGUG | UUUGGGUGUGUUUUAG | 142791759- |
| | | UUGGG | UUUUAGAGCUA | AmGmCmUmAmGmAmAm | 142791779; |
| | | UGU | GAAAUAGCAAG | AmUmAmGmCAAGUUAA | chr7: |
| | | | UUAAAAUAAG | AAUAAGGCUAGUCCGU | 142801106- |
| | | | GCUAGUCCGUU | UAUCAmAmCmUmUmGm | 142801126 |
| | | | AUCAACUUGAA | AmAmAmAmAmGmUmG | |
| | | | AAAGUGGCACC | mGmCmAmCmCmGmAmG | |
| | | | GAGUCGGUGCU | mUmCmGmGmUmGmCmU | |
| | | | UUU | *mU*mU*mU | |
| G016222 | 636 | ACCACG | ACCACGUGGAG | mA*mC*mC*ACGUGGAG | chr7: |
| | | UGGAGC | CUGAGCUGGGU | CUGAGCUGGGUUUUAG | 142791807- |
| | | UGAGCU | UUUAGAGCUAG | AmGmCmUmAmGmAmAm | 142791827; |
| | | GG | AAAUAGCAAGU | AmUmAmGmCAAGUUAA | chr7: |
| | | | UAAAAUAAGGC | AAUAAGGCUAGUCCGU | 142801154- |
| | | | UAGUCCGUUAU | UAUCAmAmCmUmUmGm | 142801174 |
| | | | CAACUUGAAAA | AmAmAmAmAmGmUmG | |
| | | | AGUGGCACCGA | mGmCmAmCmCmGmAmG | |
| | | | GUCGGUGCUUU | mUmCmGmGmUmGmCmU | |
| | | | U | *mU*mU*mU | |
| G016233 | 637 | GAGGGC | GAGGGGGGCU | mG*mA*mG*GGCGGGCU | chr7: |
| | | GGGCUG | GCUCCUUGAGU | GCUCCUUGAGUUUUAG | 142791879- |
| | | CUCCUU | UUUAGAGCUAG | AmGmCmUmAmGmAmAm | 142791899; |
| | | GA | AAAUAGCAAGU | AmUmAmGmCAAGUUAA | chr7: |
| | | | UAAAAUAAGGC | AAUAAGGCUAGUCCGU | 142801226- |
| | | | UAGUCCGUUAU | UAUCAmAmCmUmUmGm | 142801246 |
| | | | CAACUUGAAAA | AmAmAmAmAmGmUmG | |
| | | | AGUGGCACCGA | mGmCmAmCmCmGmAmG | |
| | | | GUCGGUGCUUU | mUmCmGmGmUmGmCmU | |
| | | | U | *mU*mU*mU | |
| G016264 | 638 | AGCUCA | AGCUCAGCUCC | mA*mG*mC*UCAGCUCC | chr7: |
| | | GCUCCA | ACGUGGUCAGU | ACGUGGUCAGUUUUAG | 142791805- |
| | | CGUGGU | UUUAGAGCUAG | AmGmCmUmAmGmAmAm | 142791825 |
| | | CA | AAAUAGCAAGU | AmUmAmGmCAAGUUAA | |
| | | | UAAAAUAAGGC | AAUAAGGCUAGUCCGU | |
| | | | UAGUCCGUUAU | UAUCAmAmCmUmUmGm | |
| | | | CAACUUGAAAA | AmAmAmAmAmGmUmG | |
| | | | AGUGGCACCGA | mGmCmAmCmCmGmAmG | |
| | | | GUCGGUGCUUU | mUmCmGmGmUmGmCmU | |
| | | | U | *mU*mU*mU | |
| G016255 | 639 | GAACAA | GAACAAGGUGU | mG*mA*mA*CAAGGUGU | chr7: |
| | | GGUGU | UCCCACCCGGU | UCCCACCCGGUUUUAGA | 142791700- |
| | | UCCCAC | UUUAGAGCUAG | mGmCmUmAmGmAmAmA | 142791720 |
| | | CCG | AAAUAGCAAGU | mUmAmGmCAAGUUAAA | |
| | | | UAAAAUAAGGC | AUAAGGCUAGUCCGUU | |
| | | | UAGUCCGUUAU | AUCAmAmCmUmUmGmA | |
| | | | CAACUUGAAAA | mAmAmAmAmGmUmGm | |
| | | | AGUGGCACCGA | GmCmAmCmCmGmAmGm | |
| | | | GUCGGUGCUUU | UmCmGmGmUmGmCmU* | |
| | | | U | mU*mU*mU | |
| G016177 | 640 | GCACAC | GCACACCAGUG | mG*mC*mA*CACCAGUG | chr7: |
| | | CAGUGU | UGGCCUUUUGU | UGGCCUUUUGUUUUAG | 142791765- |
| | | GGCCUU | UUUAGAGCUAG | AmGmCmUmAmGmAmAm | 142791785; |
| | | UU | AAAUAGCAAGU | AmUmAmGmCAAGUUAA | chr7: |
| | | | UAAAAUAAGGC | AAUAAGGCUAGUCCGU | 142801112- |
| | | | UAGUCCGUUAU | UAUCAmAmCmUmUmGm | 142801132 |
| | | | CAACUUGAAAA | AmAmAmAmAmGmUmG | |
| | | | AGUGGCACCGA | mGmCmAmCmCmGmAmG | |
| | | | GUCGGUGCUUU | mUmCmGmGmUmGmCmU | |
| | | | U | *mU*mU*mU | |
| G016283 | 641 | GAGCUG | GAGCUGGUGGG | mG*mA*mG*CUGGUGGG | chr7: |
| | | GUGGG | UGAAUGGGAG | UGAAUGGGAGUUUUAG | 142791820- |
| | | UGAAU | UUUUAGAGCUA | AmGmCmUmAmGmAmAm | 142791840 |
| | | GGGA | GAAAUAGCAAG | AmUmAmGmCAAGUUAA | |
| | | | UUAAAAUAAG | AAUAAGGCUAGUCCGU | |
| | | | GCUAGUCCGUU | UAUCAmAmCmUmUmGm | |
| | | | AUCAACUUGAA | AmAmAmAmAmGmUmG | |
| | | | AAAGUGGCACC | mGmCmAmCmCmGmAmG | |
| | | | GAGUCGGUGCU | mUmCmGmGmUmGmCmU | |
| | | | UUU | *mU*mU*mU | |
| G016194 | 642 | GGCUGC | GGCUGCUCCUU | mG*mG*mC*UGCUCCUU | chr7: |
| | | UCCUUG | GAGGGGCUGGU | GAGGGGCUGGUUUUAG | 142791872- |
| | | AGGGGC | UUUAGAGCUAG | AmGmCmUmAmGmAmAm | 142791892; |
| | | UG | AAAUAGCAAGU | AmUmAmGmCAAGUUAA | chr7: |
| | | | UAAAAUAAGGC | AAUAAGGCUAGUCCGU | 142801219- |
| | | | UAGUCCGUUAU | UAUCAmAmCmUmUmGm | 142801239 |
| | | | CAACUUGAAAA | AmAmAmAmAmGmUmG | |
| | | | AGUGGCACCGA | mGmCmAmCmCmGmAmG | |
| | | | GUCGGUGCUUU | mUmCmGmGmUmGmCmU | |
| | | | U | *mU*mU*mU | |
| G016266 | 643 | CGGGUG | CGGGUGGGAAC | mC*mG*mG*GUGGGAAC | chr7: |
| | | GGAACA | ACCUUGUUCGU | ACCUUGUUCGUUUUAG | 142791700- |
| | | CCUUGU | UUUAGAGCUAG | AmGmCmUmAmGmAmAm | 142791720 |
| | | UC | AAAUAGCAAGU | AmUmAmGmCAAGUUAA | |
| | | | UAAAAUAAGGC | AAUAAGGCUAGUCCGU | |
| | | | UAGUCCGUUAU | UAUCAmAmCmUmUmGm | |
| | | | CAACUUGAAAA | AmAmAmAmAmGmUmG | |
| | | | AGUGGCACCGA | mGmCmAmCmCmGmAmG | |
| | | | GUCGGUGCUUU | mUmCmGmGmUmGmCmU | |
| | | | U | *mU*mU*mU | |
| G016196 | 644 | CAGCUC | CAGCUCAGCUC | mC*mA*mG*CUCAGCUC | chr7: |
| | | AGCUCC | CACGUGGUCGU | CACGUGGUCGUUUUAG | 142791806- |
| | | ACGUGG | UUUAGAGCUAG | AmGmCmUmAmGmAmAm | 142791826; |
| | | UC | AAAUAGCAAGU | AmUmAmGmCAAGUUAA | chr7: |
| | | | UAAAAUAAGGC | AAUAAGGCUAGUCCGU | 142801153- |
| | | | UAGUCCGUUAU | UAUCAmAmCmUmUmGm | 142801173 |
| | | | CAACUUGAAAA | AmAmAmAmAmGmUmG | |
| | | | AGUGGCACCGA | mGmCmAmCmCmGmAmG | |
| | | | GUCGGUGCUUU | mUmCmGmGmUmGmCmU | |
| | | | U | *mU*mU*mU | |
| G016274 | 645 | GACGAU | GACGAUCUGGG | mG*mA*mC*GAUCUGGG | chr7: |
| | | CUGGGU | UGACGGGUUGU | UGACGGGUUGUUUUAG | 142792035- |
| | | GACGGG | UUUAGAGCUAG | AmGmCmUmAmGmAmAm | 142792055 |
| | | UU | AAAUAGCAAGU | AmUmAmGmCAAGUUAA | |
| | | | UAAAAUAAGGC | AAUAAGGCUAGUCCGU | |
| | | | UAGUCCGUUAU | UAUCAmAmCmUmUmGm | |
| | | | CAACUUGAAAA | AmAmAmAmAmGmUmG | |
| | | | AGUGGCACCGA | mGmCmAmCmCmGmAmG | |
| | | | GUCGGUGCUUU | mUmCmGmGmUmGmCmU | |
| | | | U | *mU*mU*mU | |
| G016282 | 646 | UAGCAG | UAGCAGGAUCU | mU*mA*mG*CAGGAUCU | chr7: |
| | | GAUCUC | CAUAGAGGAGU | CAUAGAGGAGUUUUAG | 142792724- |
| | | AUAGA | UUUAGAGCUAG | AmGmCmUmAmGmAmAm | 142792744 |
| | | GGA | AAAUAGCAAGU | AmUmAmGmCAAGUUAA | |
| | | | UAAAAUAAGGC | AAUAAGGCUAGUCCGU | |
| | | | UAGUCCGUUAU | UAUCAmAmCmUmUmGm | |
| | | | CAACUUGAAAA | AmAmAmAmAmGmUmG | |
| | | | AGUGGCACCGA | mGmCmAmCmCmGmAmG | |
| | | | GUCGGUGCUUU | mUmCmGmGmUmGmCmU | |
| | | | U | *mU*mU*mU | |
| G016267 | 647 | GACCAG | GACCAGCACAG | mG*mA*mC*CAGCACAG | chr7: |
| | | CACAGC | CAUACAGGGGU | CAUACAGGGGUUUUAG | 142792754- |
| | | AUACAG | UUUAGAGCUAG | AmGmCmUmAmGmAmAm | 142792774 |
| | | GG | AAAUAGCAAGU | AmUmAmGmCAAGUUAA | |
| | | | UAAAAUAAGGC | AAUAAGGCUAGUCCGU | |
| | | | UAGUCCGUUAU | UAUCAmAmCmUmUmGm | |
| | | | CAACUUGAAAA | AmAmAmAmAmGmUmG | |
| | | | AGUGGCACCGA | mGmCmAmCmCmGmAmG | |
| | | | GUCGGUGCUUU | mUmCmGmGmUmGmCmU | |
| | | | U | *mU*mU*mU | |
| G016261 | 648 | CUGACC | CUGACCACGUG | mC*mU*mG*ACCACGUG | chr7: |
| | | ACGUGG | GAGCUGAGCGU | GAGCUGAGCGUUUUAG | 142791804- |
| | | AGCUGA | UUUAGAGCUAG | AmGmCmUmAmGmAmAm | 142791824 |
| | | GC | AAAUAGCAAGU | AmUmAmGmCAAGUUAA | |
| | | | UAAAAUAAGGC | AAUAAGGCUAGUCCGU | |
| | | | UAGUCCGUUAU | UAUCAmAmCmUmUmGm | |
| | | | CAACUUGAAAA | AmAmAmAmAmGmUmG | |
| | | | AGUGGCACCGA | mGmCmAmCmCmGmAmG | |
| | | | GUCGGUGCUUU | mUmCmGmGmUmGmCmU | |
| | | | U | *mU*mU*mU | |
| G016277 | 649 | CCAACA | CCAACAGUGUC | mC*mC*mA*ACAGUGUC | chr7: |
| | | GUGUCC | CUACCAGCAGU | CUACCAGCAGUUUUAG | 142792684- |
| | | UACCAG | UUUAGAGCUAG | AmGmCmUmAmGmAmAm | 142792704 |
| | | CA | AAAUAGCAAGU | AmUmAmGmCAAGUUAA | |
| | | | UAAAAUAAGGC | AAUAAGGCUAGUCCGU | |
| | | | UAGUCCGUUAU | UAUCAmAmCmUmUmGm | |
| | | | CAACUUGAAAA | AmAmAmAmAmGmUmG | |
| | | | AGUGGCACCGA | mGmCmAmCmCmGmAmG | |
| | | | GUCGGUGCUUU | mUmCmGmGmUmGmCmU | |
| | | | U | *mU*mU*mU | |
| G016285 | 650 | CUGGUG | CUGGUGGGUGA | mC*mU*mG*GUGGGUGA | chr7: |
| | | GGUGA | AUGGGAAGGG | AUGGGAAGGGUUUUAG | 142791823- |
| | | AUGGG | UUUUAGAGCUA | AmGmCmUmAmGmAmAm | 142791843 |
| | | AAGG | GAAAUAGCAAG | AmUmAmGmCAAGUUAA | |
| | | | UUAAAAUAAG | AAUAAGGCUAGUCCGU | |
| | | | GCUAGUCCGUU | UAUCAmAmCmUmUmGm | |
| | | | AUCAACUUGAA | AmAmAmAmAmGmUmG | |
| | | | AAAGUGGCACC | mGmCmAmCmCmGmAmG | |
| | | | GAGUCGGUGCU | mUmCmGmGmUmGmCmU | |
| | | | UUU | *mU*mU*mU | |
| G016275 | 651 | CUAUGA | CUAUGAGAUCC | mC*mU*mA*UGAGAUCC | chr7: |
| | | GAUCCU | UGCUAGGGAGU | UGCUAGGGAGUUUUAG | 142792728- |
| | | GCUAGG | UUUAGAGCUAG | AmGmCmUmAmGmAmAm | 142792748 |
| | | GA | AAAUAGCAAGU | AmUmAmGmCAAGUUAA | |
| | | | UAAAAUAAGGC | AAUAAGGCUAGUCCGU | |
| | | | UAGUCCGUUAU | UAUCAmAmCmUmUmGm | |
| | | | CAACUUGAAAA | AmAmAmAmAmGmUmG | |
| | | | AGUGGCACCGA | mGmCmAmCmCmGmAmG | |
| | | | GUCGGUGCUUU | mUmCmGmGmUmGmCmU | |
| | | | U | *mU*mU*mU | |
| G016281 | 652 | CAGGAU | CAGGAUCUCAU | mC*mA*mG*GAUCUCAU | chr7: |
| | | CUCAUA | AGAGGAUGGG | AGAGGAUGGGUUUUAG | 142792721- |
| | | GAGGA | UUUUAGAGCUA | AmGmCmUmAmGmAmAm | 142792741 |
| | | UGG | GAAAUAGCAAG | AmUmAmGmCAAGUUAA | |
| | | | UUAAAAUAAG | AAUAAGGCUAGUCCGU | |
| | | | GCUAGUCCGUU | UAUCAmAmCmUmUmGm | |
| | | | AUCAACUUGAA | AmAmAmAmAmGmUmG | |
| | | | AAAGUGGCACC | mGmCmAmCmCmGmAmG | |
| | | | GAGUCGGUGCU | mUmCmGmGmUmGmCmU | |
| | | | UUU | *mU*mU*mU | |
| G016280 | 653 | GGCCAC | GGCCACCCUGU | mG*mG*mC*CACCCUGU | chr7: |
| | | CCUGUA | AUGCUGUGCGU | AUGCUGUGCGUUUUAG | 142792749- |
| | | UGCUGU | UUUAGAGCUAG | AmGmCmUmAmGmAmAm | 142792769 |
| | | GC | AAAUAGCAAGU | AmUmAmGmCAAGUUAA | |
| | | | UAAAAUAAGGC | AAUAAGGCUAGUCCGU | |
| | | | UAGUCCGUUAU | UAUCAmAmCmUmUmGm | |
| | | | CAACUUGAAAA | AmAmAmAmAmGmUmG | |
| | | | AGUGGCACCGA | mGmCmAmCmCmGmAmG | |
| | | | GUCGGUGCUUU | mUmCmGmGmUmGmCmU | |
| | | | U | *mU*mU*mU | |
| G016279 | 654 | CAACAG | CAACAGUGUCC | mC*mA*mA*CAGUGUCC | chr7: |
| | | UGUCCU | UACCAGCAAGU | UACCAGCAAGUUUUAG | 142792685- |
| | | ACCAGC | UUUAGAGCUAG | AmGmCmUmAmGmAmAm | 142792705 |
| | | AA | AAAUAGCAAGU | AmUmAmGmCAAGUUAA | |
| | | | UAAAAUAAGGC | AAUAAGGCUAGUCCGU | |
| | | | UAGUCCGUUAU | UAUCAmAmCmUmUmGm | |
| | | | CAACUUGAAAA | AmAmAmAmAmGmUmG | |
| | | | AGUGGCACCGA | mGmCmAmCmCmGmAmG | |
| | | | GUCGGUGCUUU | mUmCmGmGmUmGmCmU | |
| | | | U | *mU*mU*mU | |
| G016250 | 655 | AGCUGA | AGCUGAGCUGG | mA*mG*mC*UGAGCUGG | chr7: |
| | | GCUGGU | UGGGUGAAUG | UGGGUGAAUGUUUUAG | 142791816- |
| | | GGGUG | UUUUAGAGCUA | AmGmCmUmAmGmAmAm | 142791836; |
| | | AAU | GAAAUAGCAAG | AmUmAmGmCAAGUUAA | chr7: |
| | | | UUAAAAUAAG | AAUAAGGCUAGUCCGU | 142801163- |
| | | | GCUAGUCCGUU | UAUCAmAmCmUmUmGm | 142801183 |
| | | | AUCAACUUGAA | AmAmAmAmAmGmUmG | |
| | | | AAAGUGGCACC | mGmCmAmCmCmGmAmG | |
| | | | GAGUCGGUGCU | mUmCmGmGmUmGmCmU | |
| | | | UUU | *mU*mU*mU | |
| G016278 | 656 | AACAGU | AACAGUGUCCU | mA*mA*mC*AGUGUCCU | chr7: |
| | | GUCCUA | ACCAGCAAGGU | ACCAGCAAGGUUUUAG | 142792686- |
| | | CCAGCA | UUUAGAGCUAG | AmGmCmUmAmGmAmAm | 142792706 |
| | | AG | AAAUAGCAAGU | AmUmAmGmCAAGUUAA | |
| | | | UAAAAUAAGGC | AAUAAGGCUAGUCCGU | |
| | | | UAGUCCGUUAU | UAUCAmAmCmUmUmGm | |
| | | | CAACUUGAAAA | AmAmAmAmAmGmUmG | |
| | | | AGUGGCACCGA | mGmCmAmCmCmGmAmG | |
| | | | GUCGGUGCUUU | mUmCmGmGmUmGmCmU | |
| | | | U | *mU*mU*mU | |
| G016259 | 657 | AGGCUU | AGGCUUCUUCC | mA*mG*mG*CUUCUUCC | chr7: |
| | | CUUCCC | CUGACCACGGU | CUGACCACGGUUUUAG | 142791793- |
| | | UGACCA | UUUAGAGCUAG | AmGmCmUmAmGmAmAm | 142791813 |
| | | CG | AAAUAGCAAGU | AmUmAmGmCAAGUUAA | |
| | | | UAAAAUAAGGC | AAUAAGGCUAGUCCGU | |
| | | | UAGUCCGUUAU | UAUCAmAmCmUmUmGm | |
| | | | CAACUUGAAAA | AmAmAmAmAmGmUmG | |
| | | | AGUGGCACCGA | mGmCmAmCmCmGmAmG | |
| | | | GUCGGUGCUUU | mUmCmGmGmUmGmCmU | |
| | | | U | *mU*mU*mU | |
| G016284 | 658 | UCUUCU | UCUUCUGCAGG | mU*mC*mU*UCUGCAGG | chr7: |
| | | GCAGGU | UCAAGAGAAGU | UCAAGAGAAGUUUUAG | 142793110- |
| | | CAAGAG | UUUAGAGCUAG | AmGmCmUmAmGmAmAm | 142793130 |
| | | AA | AAAUAGCAAGU | AmUmAmGmCAAGUUAA | |
| | | | UAAAAUAAGGC | AAUAAGGCUAGUCCGU | |
| | | | UAGUCCGUUAU | UAUCAmAmCmUmUmGm | |
| | | | CAACUUGAAAA | AmAmAmAmAmGmUmG | |
| | | | AGUGGCACCGA | mGmCmAmCmCmGmAmG | |
| | | | GUCGGUGCUUU | mUmCmGmGmUmGmCmU | |
| | | | U | *mU*mU*mU | |
| G016249 | 659 | GAGCUG | GAGCUGAGCUG | mG*mA*mG*CUGAGCUG | chr7: |
| | | AGCUGG | GUGGGUGAAG | GUGGGUGAAGUUUUAG | 142791815- |
| | | UGGGU | UUUUAGAGCUA | AmGmCmUmAmGmAmAm | 142791835; |
| | | GAA | GAAAUAGCAAG | AmUmAmGmCAAGUUAA | chr7: |
| | | | UUAAAAUAAG | AAUAAGGCUAGUCCGU | 142801162- |
| | | | GCUAGUCCGUU | UAUCAmAmCmUmUmGm | 142801182 |
| | | | AUCAACUUGAA | AmAmAmAmAmGmUmG | |
| | | | AAAGUGGCACC | mGmCmAmCmCmGmAmG | |
| | | | GAGUCGGUGCU | mUmCmGmGmUmGmCmU | |
| | | | UUU | *mU*mU*mU | |
| G016256 | 660 | GGUCAG | GGUCAGCGCCC | mG*mG*mU*CAGCGCCC | chr7: |
| | | CGCCCU | UUGUGUUGAG | UUGUGUUGAGUUUUAG | 142792770- |
| | | UGUGU | UUUUAGAGCUA | AmGmCmUmAmGmAmAm | 142792790 |
| | | UGA | GAAAUAGCAAG | AmUmAmGmCAAGUUAA | |
| | | | UUAAAAUAAG | AAUAAGGCUAGUCCGU | |
| | | | GCUAGUCCGUU | UAUCAmAmCmUmUmGm | |
| | | | AUCAACUUGAA | AmAmAmAmAmGmUmG | |
| | | | AAAGUGGCACC | mGmCmAmCmCmGmAmG | |
| | | | GAGUCGGUGCU | mUmCmGmGmUmGmCmU | |
| | | | UUU | *mU*mU*mU | |
| G016190 | 661 | AGAUCG | AGAUCGUCAGC | mA*mG*mA*UCGUCAGC | chr7: |
| | | UCAGCG | GCCGAGGCCGU | GCCGAGGCCGUUUUAG | 142792047- |
| | | CCGAGG | UUUAGAGCUAG | AmGmCmUmAmGmAmAm | 142792067; |
| | | CC | AAAUAGCAAGU | AmUmAmGmCAAGUUAA | chr7: |
| | | | UAAAAUAAGGC | AAUAAGGCUAGUCCGU | 142801394- |
| | | | UAGUCCGUUAU | UAUCAmAmCmUmUmGm | 142801414 |
| | | | CAACUUGAAAA | AmAmAmAmAmGmUmG | |
| | | | AGUGGCACCGA | mGmCmAmCmCmGmAmG | |
| | | | GUCGGUGCUUU | mUmCmGmGmUmGmCmU | |
| | | | U | *mU*mU*mU | |
| G016248 | 662 | GCUGCU | GCUGCUCCUUG | mG*mC*mU*GCUCCUUG | chr7: |
| | | CCUUGA | AGGGGCUGCGU | AGGGGCUGCGUUUUAG | 142791871- |
| | | GGGGCU | UUUAGAGCUAG | AmGmCmUmAmGmAmAm | 142791891; |
| | | GC | AAAUAGCAAGU | AmUmAmGmCAAGUUAA | chr7: |
| | | | UAAAAUAAGGC | AAUAAGGCUAGUCCGU | 142801218- |
| | | | UAGUCCGUUAU | UAUCAmAmCmUmUmGm | 142801238 |
| | | | CAACUUGAAAA | AmAmAmAmAmGmUmG | |
| | | | AGUGGCACCGA | mGmCmAmCmCmGmAmG | |
| | | | GUCGGUGCUUU | mUmCmGmGmUmGmCmU | |
| | | | U | *mU*mU*mU | |
| G016257 | 663 | GUAUCU | GUAUCUGGAGU | mG*mU*mA*UCUGGAGU | chr7: |
| | | GGAGUC | CAUUGAGGGGU | CAUUGAGGGGUUUUAG | 142791894- |
| | | AUUGA | UUUAGAGCUAG | AmGmCmUmAmGmAmAm | 142791914 |
| | | GGG | AAAUAGCAAGU | AmUmAmGmCAAGUUAA | |
| | | | UAAAAUAAGGC | AAUAAGGCUAGUCCGU | |
| | | | UAGUCCGUUAU | UAUCAmAmCmUmUmGm | |
| | | | CAACUUGAAAA | AmAmAmAmAmGmUmG | |
| | | | AGUGGCACCGA | mGmCmAmCmCmGmAmG | |
| | | | GUCGGUGCUUU | mUmCmGmGmUmGmCmU | |
| | | | U | *mU*mU*mU | |
| G016260 | 664 | AUCCUC | AUCCUCUAUGA | mA*mU*mC*CUCUAUGA | chr7: |
| | | UAUGA | GAUCCUGCUGU | GAUCCUGCUGUUUUAG | 142792723- |
| | | GAUCCU | UUUAGAGCUAG | AmGmCmUmAmGmAmAm | 142792743 |
| | | GCU | AAAUAGCAAGU | AmUmAmGmCAAGUUAA | |
| | | | UAAAAUAAGGC | AAUAAGGCUAGUCCGU | |
| | | | UAGUCCGUUAU | UAUCAmAmCmUmUmGm | |
| | | | CAACUUGAAAA | AmAmAmAmAmGmUmG | |
| | | | AGUGGCACCGA | mGmCmAmCmCmGmAmG | |
| | | | GUCGGUGCUUU | mUmCmGmGmUmGmCmU | |
| | | | U | *mU*mU*mU | |
| G016262 | 665 | UCCUCU | UCCUCUAUGAG | mU*mC*mC*UCUAUGAG | chr7: |
| | | AUGAG | AUCCUGCUAGU | AUCCUGCUAGUUUUAG | 142792724- |
| | | AUCCUG | UUUAGAGCUAG | AmGmCmUmAmGmAmAm | 142792744 |
| | | CUA | AAAUAGCAAGU | AmUmAmGmCAAGUUAA | |
| | | | UAAAAUAAGGC | AAUAAGGCUAGUCCGU | |
| | | | UAGUCCGUUAU | UAUCAmAmCmUmUmGm | |
| | | | CAACUUGAAAA | AmAmAmAmAmGmUmG | |
| | | | AGUGGCACCGA | mGmCmAmCmCmGmAmG | |
| | | | GUCGGUGCUUU | mUmCmGmGmUmGmCmU | |
| | | | U | *mU*mU*mU | |
| G016242 | 666 | GCAGUA | GCAGUAUCUGG | mG*mC*mA*GUAUCUGG | chr7: |
| | | UCUGGA | AGUCAUUGAGU | AGUCAUUGAGUUUUAG | 142791897- |
| | | GUCAUU | UUUAGAGCUAG | AmGmCmUmAmGmAmAm | 142791917; |
| | | GA | AAAUAGCAAGU | AmUmAmGmCAAGUUAA | chr7: |
| | | | UAAAAUAAGGC | AAUAAGGCUAGUCCGU | 142801244- |
| | | | UAGUCCGUUAU | UAUCAmAmCmUmUmGm | 142801264 |
| | | | CAACUUGAAAA | AmAmAmAmAmGmUmG | |
| | | | AGUGGCACCGA | mGmCmAmCmCmGmAmG | |
| | | | GUCGGUGCUUU | mUmCmGmGmUmGmCmU | |
| | | | U | *mU*mU*mU | |
| G016268 | 667 | GCUGAC | GCUGACCAGCA | mG*mC*mU*GACCAGCA | chr7: |
| | | CAGCAC | CAGCAUACAGU | CAGCAUACAGUUUUAG | 142792757- |
| | | AGCAUA | UUUAGAGCUAG | AmGmCmUmAmGmAmAm | 142792777 |
| | | CA | AAAUAGCAAGU | AmUmAmGmCAAGUUAA | |
| | | | UAAAAUAAGGC | AAUAAGGCUAGUCCGU | |
| | | | UAGUCCGUUAU | UAUCAmAmCmUmUmGm | |
| | | | CAACUUGAAAA | AmAmAmAmAmGmUmG | |
| | | | AGUGGCACCGA | mGmCmAmCmCmGmAmG | |
| | | | GUCGGUGCUUU | mUmCmGmGmUmGmCmU | |
| | | | U | *mU*mU*mU | |
| G016265 | 668 | ACAGGG | ACAGGGUGGCC | mA*mC*mA*GGGUGGCC | chr7: |
| | | UGGCCU | UUCCCUAGCGU | UUCCCUAGCGUUUUAG | 142792740- |
| | | UCCCUA | UUUAGAGCUAG | AmGmCmUmAmGmAmAm | 142792760 |
| | | GC | AAAUAGCAAGU | AmUmAmGmCAAGUUAA | |
| | | | UAAAAUAAGGC | AAUAAGGCUAGUCCGU | |
| | | | UAGUCCGUUAU | UAUCAmAmCmUmUmGm | |
| | | | CAACUUGAAAA | AmAmAmAmAmGmUmG | |
| | | | AGUGGCACCGA | mGmCmAmCmCmGmAmG | |
| | | | GUCGGUGCUUU | mUmCmGmGmUmGmCmU | |
| | | | U | *mU*mU*mU | |
| G016254 | 669 | CGCUGA | CGCUGACCAGC | mC*mG*mC*UGACCAGC | chr7: |
| | | CCAGCA | ACAGCAUACGU | ACAGCAUACGUUUUAG | 142792758- |
| | | CAGCAU | UUUAGAGCUAG | AmGmCmUmAmGmAmAm | 142792778 |
| | | AC | AAAUAGCAAGU | AmUmAmGmCAAGUUAA | |
| | | | UAAAAUAAGGC | AAUAAGGCUAGUCCGU | |
| | | | UAGUCCGUUAU | UAUCAmAmCmUmUmGm | |
| | | | CAACUUGAAAA | AmAmAmAmAmGmUmG | |
| | | | AGUGGCACCGA | mGmCmAmCmCmGmAmG | |
| | | | GUCGGUGCUUU | mUmCmGmGmUmGmCmU | |
| | | | U | *mU*mU*mU | |

[0503] In some embodiments, the guide sequence comprises SEQ ID NO: 618. In some embodiments, the guide sequence comprises SEQ ID NO: 619. In some embodiments, the guide sequence comprises SEQ ID NO: 620. In some embodiments, the guide sequence comprises SEQ ID NO: 621. In some embodiments, the guide sequence comprises SEQ ID NO: 622. In some embodiments, the guide sequence comprises SEQ ID NO: 623. In some embodiments, the guide sequence comprises SEQ ID NO: 624. In some embodiments, the guide sequence comprises SEQ ID NO: 625. In some embodiments, the guide sequence comprises SEQ ID NO: 626. In some embodiments, the guide sequence comprises SEQ ID NO: 627. In some embodiments, the guide sequence comprises SEQ ID NO: 628. In some embodiments, the guide sequence comprises SEQ ID NO: 629. In some embodiments, the guide sequence comprises SEQ ID NO: 630. In some embodiments, the guide sequence comprises SEQ ID NO: 631. In some embodiments, the guide sequence comprises SEQ ID NO: 632. In some embodiments, the guide sequence comprises SEQ ID NO: 633. In some embodiments, the guide sequence comprises SEQ ID NO: 634. In some embodiments, the guide sequence comprises SEQ ID NO: 635. In some embodiments, the guide sequence comprises SEQ ID NO: 636. In some embodiments, the guide sequence comprises SEQ ID NO: 637. In some embodiments, the guide sequence comprises SEQ ID NO: 638. In some embodiments, the guide sequence comprises SEQ ID NO: 639. In some embodiments, the guide sequence comprises SEQ ID NO: 640. In some embodiments, the guide sequence comprises SEQ ID NO: 641. In some embodiments, the guide sequence comprises SEQ ID NO: 642. In some embodiments, the guide sequence comprises SEQ ID NO: 643. In some embodiments, the guide sequence comprises SEQ ID NO: 644. In some embodiments, the guide sequence comprises SEQ ID NO: 645. In some embodiments, the guide sequence comprises SEQ ID NO: 646. In some embodiments, the guide sequence comprises SEQ ID NO: 647. In some embodiments, the guide sequence comprises SEQ ID NO: 648. In some embodiments, the guide sequence comprises SEQ ID NO: 649. In some embodiments, the guide sequence comprises SEQ ID NO: 650. In some embodiments, the guide sequence comprises SEQ ID NO: 651. In some embodiments, the guide sequence comprises SEQ ID NO: 652. In some embodiments, the guide sequence comprises SEQ ID NO: 653. In some embodiments, the guide sequence comprises SEQ ID NO: 654. In some embodiments, the guide sequence comprises SEQ ID NO: 655. In some embodiments, the guide sequence comprises SEQ ID NO: 656. In some embodiments, the guide sequence comprises SEQ ID NO: 657. In some embodiments, the guide sequence comprises SEQ ID NO: 658. In some embodiments, the guide sequence comprises SEQ ID NO: 659. In some embodiments, the guide sequence comprises SEQ ID NO: 660. In some embodiments, the guide sequence comprises SEQ ID NO: 661. In some embodiments, the guide sequence comprises SEQ ID NO: 662. In some embodiments, the guide sequence comprises SEQ ID NO: 663. In some embodiments, the guide sequence comprises SEQ ID NO: 664. In some embodiments, the guide sequence comprises SEQ ID NO: 665. In some embodiments, the guide sequence comprises SEQ ID NO: 666. In some embodiments, the guide sequence comprises SEQ ID NO: 667. In some embodiments, the guide sequence comprises SEQ ID NO: 668. In some embodiments, the guide sequence comprises SEQ ID NO: 669.

[0504] In some embodiments, the disclosure provides a method of altering a DNA sequence within a TRAC gene, comprising delivering a composition disclosed herein to a cell. The composition may comprise:
[0505] a. a gRNA comprising a guide sequence chosen from: i) SEQ ID NOs: 706-721; ii) at least 17, 18, 19, or 20 contiguous nucleotides of a sequence selected from SEQ ID NOs: 706-721; iii) a guide sequence at least 95%, 90%, or 85% identical to a sequence selected from SEQ ID NOs: 706-721; iv) a sequence that comprises 10 contiguous nucleotides±10 nucleotides of a genomic coordinate listed in Table 5A; v) at least 17, 18, 19, or 20 contiguous nucleotides of a sequence from (iv); or vi) a guide sequence that is at least 95%, 90%, or 85% identical to a sequence selected from (v); or
[0506] b. a nucleic acid encoding a gRNA of (a.).

[0507] In some embodiments, the disclosure provides a method of reducing the expression of a TRAC gene, comprising delivering a composition disclosed herein to a cell. The composition may comprise:
[0508] a. a gRNA comprising a guide sequence chosen from: i) SEQ ID NOs: 706-721; ii) at least 17, 18, 19, or 20 contiguous nucleotides of a sequence selected from SEQ ID NOs: 706-721; iii) a guide sequence at least 95%, 90%, or 85% identical to a sequence selected from SEQ ID NOs: 706-721; iv) a sequence that comprises 10 contiguous nucleotides±10 nucleotides of a genomic coordinate listed in Table 5A; v) at least 17, 18, 19, or 20 contiguous nucleotides of a sequence from (iv); or vi) a guide sequence that is at least 95%, 90%, or 85% identical to a sequence selected from (v); or
[0509] b. a nucleic acid encoding a gRNA of (a.).

[0510] In some embodiments, the disclosure provides a method of immunotherapy comprising administering a composition disclosed herein to a subject, an autologous cell thereof, and/or an allogeneic cell. The composition may comprise:
[0511] a. a gRNA comprising a guide sequence chosen from: i) SEQ ID NOs: 706-721; ii) at least 17, 18, 19, or 20 contiguous nucleotides of a sequence selected from SEQ ID NOs: 706-721; iii) a guide sequence at least 95%, 90%, or 85% identical to a sequence selected from SEQ ID NOs: 706-721; iv) a sequence that comprises 10 contiguous nucleotides±10 nucleotides of a genomic coordinate listed in Table 5A; v) at least 17, 18, 19, or 20 contiguous nucleotides of a sequence from (iv); or vi) a guide sequence that is at least 95%, 90%, or 85% identical to a sequence selected from (v); or
[0512] b. a nucleic acid encoding a gRNA of (a.).

[0513] In some embodiments, a cell altered by the method disclosed herein is provided. The cell may be altered ex vivo. The cell may be a T cell, a CD4⁺ or CD8⁺ cell. The cell may be a mammalian, primate, or human cell. The cell may be used for immunotherapy of a subject.

[0514] In some embodiments, a compositions is provided, comprising: a gRNA comprising a guide sequence chosen from: i) SEQ ID NOs: 706-721; ii) at least 17, 18, 19, or 20 contiguous nucleotides of a sequence selected from SEQ ID NOs: 706-721; iii) a guide sequence at least 95%, 90%, or 85% identical to a sequence selected from SEQ ID NOs: 706-721; iv) a sequence that comprises 10 contiguous nucleotides±10 nucleotides of a genomic coordinate listed in Table 5A; v) at least 17, 18, 19, or 20 contiguous nucleotides of a sequence from (iv); or vi) a guide sequence that is at least 95%, 90%, or 85% identical to a sequence selected from (v). The composition may optionally further comprise any one of a nucleic acid (e.g., mRNA), polypeptide, composition, or lipid nucleic acid assembly composition disclosed herein.

[0515] In certain embodiments, the composition disclosed herein is used for altering a DNA sequence within the TRAC gene in a cell. In certain embodiments, the composition disclosed herein is used for reducing the expression of the TRAC gene in a cell. In some embodiments, the composition disclosed herein is used for immunotherapy of a subject.

[0516] In some embodiments, the disclosure provides a method of altering a DNA sequence within a TRBC1 and/or TRBC2 gene, comprising delivering a composition disclosed herein to a cell. The composition may comprise:
[0517] a. a gRNA comprising a guide sequence chosen from: i) SEQ ID NOs: 618-669; ii) at least 17, 18, 19, or 20 contiguous nucleotides of a sequence selected from SEQ ID NOs: 618-669; iii) a guide sequence at least 95%, 90%, or 85% identical to a sequence selected from SEQ ID NOs: 618-669; iv) a sequence that comprises 10 contiguous nucleotides±10 nucleotides of a genomic coordinate listed in Table 5B; v) at least 17, 18, 19, or 20 contiguous nucleotides of a sequence from (iv); or vi) a guide sequence that is at least 95%, 90%, or 85% identical to a sequence selected from (v); or
[0518] b. a nucleic acid encoding a gRNA of (a.).

[0519] In some embodiments, the disclosure provides a method of reducing the expression of a TRBC1 and/or TRBC2 gene, comprising delivering a composition disclosed herein to a cell. The composition may comprise:
[0520] a. a gRNA comprising a guide sequence chosen from: i) SEQ ID NOs: 618-669; ii) at least 17, 18, 19, or 20 contiguous nucleotides of a sequence selected from SEQ ID NOs: 618-669; iii) a guide sequence at least 95%, 90%, or 85% identical to a sequence selected from SEQ ID NOs: 618-669; iv) a sequence that comprises 10 contiguous nucleotides±10 nucleotides of a genomic coordinate listed in Table 5C; v) at least 17, 18, 19, or 20 contiguous nucleotides of a sequence from (iv); or vi) a guide sequence that is at least 95%, 90%, or 85% identical to a sequence selected from (v); or
[0521] b. a nucleic acid encoding a gRNA of (a.).

[0522] In some embodiments, the disclosure provides a method of immunotherapy comprising administering a composition disclosed herein to a subject, an autologous cell thereof, and/or an allogeneic cell. The composition may comprise:
[0523] a. a gRNA comprising a guide sequence chosen from: i) SEQ ID NOs: 618-669; ii) at least 17, 18, 19, or 20 contiguous nucleotides of a sequence selected from SEQ ID NOs: 618-669; iii) a guide sequence at least 95%, 90%, or 85% identical to a sequence selected from SEQ ID NOs: 618-669; iv) a sequence that comprises 10 contiguous nucleotides±10 nucleotides of a genomic coordinate listed in Table 5B; v) at least 17, 18, 19, or 20 contiguous nucleotides of a sequence from (iv); or vi) a guide sequence that is at least 95%, 90%, or 85% identical to a sequence selected from (v); or
[0524] b. a nucleic acid encoding a gRNA of (a.).

[0525] In some embodiments, a cell may be provided, being altered by the method disclosed herein. The cell may be altered ex vivo. The cell is a T cell, a CD4⁺ or CD8⁺ cell. The cell may be a mammalian, primate, or human cell. The cell may be used for immunotherapy of a subject.

[0526] In some embodiments, a compositions is provided, comprising: a gRNA comprising a guide sequence chosen from: i) SEQ ID NOs: 618-669; ii) at least 17, 18, 19, or 20 contiguous nucleotides of a sequence selected from SEQ ID NOs: 618-669; iii) a guide sequence at least 95%, 90%, or 85% identical to a sequence selected from SEQ ID NOs: 618-669; iv) a sequence that comprises 10 contiguous nucleotides±10 nucleotides of a genomic coordinate listed in Table 5B; v) at least 17, 18, 19, or 20 contiguous nucleotides of a sequence from (iv); or vi) a guide sequence that is at least 95%, 90%, or 85% identical to a sequence selected from (v). The composition may optionally further comprise any one of a nucleic acid (e.g., mRNA), polypeptide, composition, or lipid nucleic acid assembly composition disclosed herein.

[0527] In certain embodiments, the composition disclosed herein is used for altering a DNA sequence within the TRBC1 and/or TRBC2 gene in a cell. In certain embodiments, the composition disclosed herein is used for reducing the expression of the TRBC1 and/or TRBC2 gene in a cell. In some embodiments, the composition disclosed herein is used for immunotherapy of a subject.

[0528] J. Exemplary DNA Molecules, Vectors, Expression Constructs, Host Cells, and Production Methods

[0529] In certain embodiments, the disclosure provides a DNA molecule comprising a sequence encoding a polypeptide described herein. In some embodiments, the DNA molecule further comprises nucleic acids that do not encode the polypeptide. Nucleic acids that do not encode the polypeptide disclosed herein include, but are not limited to, promoters, enhancers, regulatory sequences, and nucleic acids encoding a gRNA.

[0530] In some embodiments, the DNA molecule further comprises a nucleotide sequence encoding a crRNA, a trRNA, or a crRNA and trRNA. In some embodiments, the nucleotide sequence encoding the crRNA, trRNA, or crRNA and trRNA comprises or consists of a guide sequence flanked by all or a portion of a repeat sequence from a naturally-occurring CRISPR/Cas system. The nucleic acid comprising or consisting of the crRNA, trRNA, or crRNA and trRNA may further comprise a vector sequence wherein the vector sequence comprises or consists of nucleic acids that are not naturally found together with the crRNA, trRNA, or crRNA and trRNA. In some embodiments, the crRNA and the trRNA are encoded by non-contiguous nucleic acids within one vector. In other embodiments, the crRNA and the trRNA may be encoded by a contiguous nucleic acid. In some embodiments, the crRNA and the trRNA are encoded by opposite strands of a single nucleic acid. In other embodiments, the crRNA and the trRNA are encoded by the same strand of a single nucleic acid.

[0531] In some embodiments, the DNA molecule further comprises a promoter operably linked to the sequence encoding any of the mRNAs encoding the polypeptide described herein. In some embodiments, the DNA molecule is an expression construct suitable for expression in a mammalian cell, e.g., a human cell or a mouse cell, such as a human hepatocyte or a rodent (e.g., mouse) hepatocyte. In some embodiments, the DNA molecule is an expression construct suitable for expression in a cell of a mammalian organ, e.g., a human liver or a rodent (e.g., mouse) liver. In some embodiments, the DNA molecule is a plasmid or an episome. In some embodiments, the DNA molecule is contained in a host cell, such as a bacterium or a cultured eukaryotic cell. Exemplary bacteria include proteobacteria such as E. coli. Exemplary cultured eukaryotic cells include primary hepatocytes, including hepatocytes of rodent (e.g., mouse) or human origin; hepatocyte cell lines, including hepatocytes of rodent (e.g., mouse) or human origin; human cell lines; rodent (e.g., mouse) cell lines; CHO cells; microbial fungi, such as fission or budding yeasts, e.g., Saccharomyces, such as S. cerevisiae; and insect cells.

[0532] In some embodiments, a method of producing an mRNA disclosed herein is provided. In some embodiments, such a method comprises contacting a DNA molecule described herein with an RNA polymerase under conditions permissive for transcription. In some embodiments, the contacting is performed in vitro, e.g., in a cell-free system. In some embodiments, the RNA polymerase is an RNA polymerase of bacteriophage origin, such as T7 RNA polymerase. In some embodiments, NTPs are provided that include at least one modified nucleotide as discussed above. In some embodiments, the NTPs include at least one modified nucleotide as discussed above and do not comprise UTP.

[0533] In some embodiments, an mRNA disclosed herein alone or together with one or more gRNAs, may be comprised within or delivered by a vector system of one or more vectors. In some embodiments, one or more of the vectors, or all of the vectors, may be DNA vectors. In some embodiments, one or more of the vectors, or all of the vectors, may be RNA vectors. In some embodiments, one or more of the vectors, or all of the vectors, may be circular. In other embodiments, one or more of the vectors, or all of the vectors, may be linear. In some embodiments, one or more of the vectors, or all of the vectors, may be enclosed in a lipid nanoparticle, liposome, non-lipid nanoparticle, or viral capsid. Non-limiting exemplary vectors include plasmids, phagemids, cosmids, artificial chromosomes, minichromosomes, transposons, viral vectors, and expression vectors.

[0534] Non-limiting exemplary viral vectors include adeno-associated virus (AAV) vector, lentivirus vectors, adenovirus vectors, helper dependent adenoviral vectors (HDAd), herpes simplex virus (HSV-1) vectors, bacteriophage T4, baculovirus vectors, and retrovirus vectors. In some embodiments, the viral vector may be an AAV vector. In other embodiments, the viral vector may a lentivirus vector. In some embodiments, the lentivirus may be non-integrating. In some embodiments, the viral vector may be an adenovirus vector. In some embodiments, the adenovirus may be a high-cloning capacity or “gutless” adenovirus, where all coding viral regions apart from the 5′ and 3′ inverted terminal repeats (ITRs) and the packaging signal (T) are deleted from the virus to increase its packaging capacity. In yet other embodiments, the viral vector may be an HSV-1 vector. In some embodiments, the HSV-1-based vector is helper dependent, and in other embodiments it is helper independent. For example, an amplicon vector that retains only the packaging sequence requires a helper virus with structural components for packaging, while a 30 kb-deleted HSV-1 vector that removes non-essential viral functions does not require helper virus. In additional embodiments, the viral vector may be bacteriophage T4. In some embodiments, the bacteriophage T4 may be able to package any linear or circular DNA or RNA molecules when the head of the virus is emptied. In further embodiments, the viral vector may be a baculovirus vector. In yet further embodiments, the viral vector may be a retrovirus vector. In embodiments using AAV or lentiviral vectors, which have smaller cloning capacity, it may be necessary to use more than one vector to deliver all the components of a vector system as disclosed herein. For example, one AAV vector may contain sequences encoding a Cas protein, while a second AAV vector may contain one or more guide sequences.

[0535] In some embodiments, the vector may be capable of driving expression of one or more coding sequences, such as the coding sequence of an mRNA disclosed herein, in a cell. In some embodiments, the cell may be a prokaryotic cell, such as, e.g., a bacterial cell. In some embodiments, the cell may be a eukaryotic cell, such as, e.g., a yeast, plant, insect, or mammalian cell. In some embodiments, the eukaryotic cell may be a mammalian cell. In some embodiments, the eukaryotic cell may be a rodent cell. In some embodiments, the eukaryotic cell may be a human cell. Suitable promoters to drive expression in different types of cells are known in the art. In some embodiments, the promoter may be wild type. In other embodiments, the promoter may be modified for more efficient or efficacious expression. In yet other embodiments, the promoter may be truncated yet retain its function. For example, the promoter may have a normal size or a reduced size that is suitable for proper packaging of the vector into a virus.

[0536] In some embodiments, the vector system may comprise one copy of a nucleotide sequence encoding a polypeptide disclosed herein. In other embodiments, the vector system may comprise more than one copy of a nucleotide sequence encoding a polypeptide disclosed herein. In some embodiments, the nucleotide sequence encoding a polypeptide disclosed herein may be operably linked to at least one transcriptional or translational control sequence. In some embodiments, the nucleotide sequence encoding the protein may be operably linked to at least one promoter.

[0537] In some embodiments, the promoter may be constitutive, inducible, or tissue-specific. In some embodiments, the promoter may be a constitutive promoter. Non-limiting exemplary constitutive promoters include cytomegalovirus immediate early promoter (CMV), simian virus (SV40) promoter, adenovirus major late (MLP) promoter, Rous sarcoma virus (RSV) promoter, mouse mammary tumor virus (MMTV) promoter, phosphoglycerate kinase (PGK) promoter, elongation factor-alpha (EF1a) promoter, ubiquitin promoters, actin promoters, tubulin promoters, immunoglobulin promoters, a functional fragment thereof, or a combination of any of the foregoing. In some embodiments, the promoter may be a CMV promoter. In some embodiments, the promoter may be a truncated CMV promoter. In other embodiments, the promoter may be an EF1a promoter. In some embodiments, the promoter may be an inducible promoter. Non-limiting exemplary inducible promoters include those inducible by heat shock, light, chemicals, peptides, metals, steroids, antibiotics, or alcohol. In some embodiments, the inducible promoter may be one that has a low basal (non-induced) expression level, such as, e.g., the Tet-On® promoter (Clontech).

[0538] In some embodiments, the promoter may be a tissue-specific promoter, e.g., a promoter specific for expression in the liver.

[0539] The vector may further comprise a nucleotide sequence encoding at least one gRNA. In some embodiments, the vector comprises one copy of the gRNA. In other embodiments, the vector comprises more than one copy of the gRNA. In embodiments with more than one gRNA, the gRNAs may be non-identical such that they target different target sequences, or may be identical in that they target the same target sequence. In some embodiments where the vectors comprise more than one gRNA, each gRNA may have other different properties, such as activity or stability within a complex with the polypeptide comprising a cytidine deaminase (e.g., an APOBEC3A deaminase (A3A)) and an RNA-guided nickase disclosed herein. In some embodiments, the nucleotide sequence encoding the gRNA may be operably linked to at least one transcriptional or translational control sequence, such as a promoter, a 3′ UTR, or a 5′ UTR. In one embodiment, the promoter may be a tRNA promoter, e.g., tRNALys3, or a tRNA chimera. See Mefferd et al., RNA. 2015 21:1683-9; Scherer et al., Nucleic Acids Res. 2007 35: 2620-2628. In some embodiments, the promoter may be recognized by RNA polymerase III (Pol III). Non-limiting examples of Pol III promoters include U6 and H1 promoters. In some embodiments, the nucleotide sequence encoding the gRNA may be operably linked to a mouse or human U6 promoter. In other embodiments, the nucleotide sequence encoding the gRNA may be operably linked to a mouse or human H1 promoter. In embodiments with more than one gRNA, the promoters used to drive expression may be the same or different. In some embodiments, the nucleotide encoding the crRNA of the gRNA and the nucleotide encoding the trRNA of the gRNA may be provided on the same vector. In some embodiments, the nucleotide encoding the crRNA and the nucleotide encoding the trRNA may be driven by the same promoter. In some embodiments, the crRNA and trRNA may be transcribed into a single transcript. For example, the crRNA and trRNA may be processed from the single transcript to form a double-molecule gRNA. Alternatively, the crRNA and trRNA may be transcribed into a single-molecule gRNA. In other embodiments, the crRNA and the trRNA may be driven by their corresponding promoters on the same vector. In yet other embodiments, the crRNA and the trRNA may be encoded by different vectors.

[0540] In some embodiments, the compositions comprise a vector system, wherein the system comprises more than one vector. In some embodiments, the vector system may comprise one single vector. In other embodiments, the vector system may comprise two vectors. In additional embodiments, the vector system may comprise three vectors. When different gRNAs are used for multiplexing, or when multiple copies of the gRNA are used, the vector system may comprise more than three vectors.

[0541] In some embodiments, the vector system may comprise inducible promoters to start expression only after it is delivered to a target cell. Non-limiting exemplary inducible promoters include those inducible by heat shock, light, chemicals, peptides, metals, steroids, antibiotics, or alcohol. In some embodiments, the inducible promoter may be one that has a low basal (non-induced) expression level, such as, e.g., the Tet-On® promoter (Clontech).

[0542] In additional embodiments, the vector system may comprise tissue-specific promoters to start expression only after it is delivered into a specific tissue.

[0543] In some embodiments, the vector may be delivered systemically. In some embodiments, the vector may be delivered into the hepatic circulation.

Lengthy table referenced here
US20240002820A1-20240104-T00001
Please refer to the end of the specification for access instructions.

### EXAMPLES

[0544] The following examples are provided to illustrate certain disclosed embodiments and are not to be construed as limiting the scope of this disclosure in any way.

[0545] As used in the Examples below, the term “editor” refers to an agent comprising a polypeptide that is capable of deaminating a base within a DNA molecule and it is a base editor. The editor may be capable of deaminating a cytidine (C) in DNA. The editor may include an RNA-guided nickase (e.g., Cas9 nickase) fused to a cytidine deaminase (e.g., an APOBEC3A deaminase (A3A)) by an optional linker. In some cases, the editor includes a UGI. In some embodiments, the editor lacks a UGI.

[0546] An exemplary editor used in the Examples below is BC22n (SEQ ID NO:3) which consists of a H. sapiens APOBEC3A fused to S. pyogenes-D10A SpyCas9 nickase by an XTEN linker, and mRNA encoding BC22n. An mRNA encoding BC22n (SEQ ID NO: 1) is also used.

### Example 1. General Methods

### 1.1. Preparation of Lipid Nanoparticles

[0547] In general, the lipid components were dissolved in 100% ethanol at various molar ratios. The RNA cargos (e.g., Cas9 mRNA and sgRNA) were dissolved in 25 mM citrate buffer, 100 mM NaCl, pH 5.0, resulting in a concentration of RNA cargo of approximately 0.45 mg/mL.

[0548] Unless otherwise specified, the lipid nucleic acid assemblies contained ionizable Lipid A ((9Z,12Z)-3-((4,4-bis(octyloxy)butanoyl)oxy)-2-((((3-(diethylamino)propoxy)carbonyl)oxy)methyl)propyl octadeca-9,12-dienoate, also called 3-((4,4-bis(octyloxy)butanoyl)oxy)-2-((((3-(diethylamino)propoxy)carbonyl)oxy)methyl)propyl (9Z,12Z)-octadeca-9,12-dienoate), cholesterol, DSPC, and PEG2k-DMG in a 50:38:9:3 molar ratio, respectively. The lipid nucleic acid assemblies were formulated with a lipid amine to RNA phosphate (N:P) molar ratio of about 6, and a ratio of gRNA to mRNA of 1:1 by weight, unless otherwise specified.

[0549] LNPs were prepared using a cross-flow technique utilizing impinging jet mixing of the lipid in ethanol with two volumes of RNA solutions and one volume of water. The lipids in ethanol were mixed through a mixing cross with the two volumes of RNA solution. A fourth stream of water was mixed with the outlet stream of the cross through an inline tee (See WO2016010840 FIG. 2). The LNPs were held for 1 hour at room temperature, and further diluted with water (approximately 1:1 v/v). LNPs were concentrated using tangential flow filtration on a flat sheet cartridge (Sartorius, 100 kD MWCO) and buffer exchanged using PD-10 desalting columns (GE) into 50 mM Tris, 45 mM NaCl, 5% (w/v) sucrose, pH 7.5 (TSS). Alternatively, the LNP's were optionally concentrated using 100 kDa Amicon spin filter and buffer exchanged using PD-10 desalting columns (GE) into TSS. The resulting mixture was then filtered using a 0.2 μm sterile filter. The final LNP was stored at 4° C. or −80° C. until further use.

[0550] 1.2. In Vitro Transcription (“IVT”) of mRNA

[0551] Capped and polyadenylated mRNA containing N1-methyl pseudo-U was generated by in vitro transcription using a linearized plasmid DNA template and T7 RNA polymerase. Plasmid DNA containing a T7 promoter, a sequence for transcription, and a polyadenylation region was linearized by incubating at 37° C. for 2 hours with XbaI with the following conditions: 200 ng/μL plasmid, 2 U/μL XbaI (NEB), and 1× reaction buffer. The XbaI was inactivated by heating the reaction at 65° C. for 20 min. The linearized plasmid was purified from enzyme and buffer salts. The IVT reaction to generate modified mRNA was performed by incubating at 37° C. for 1.5-4 hours in the following conditions: 50 ng/μL linearized plasmid; 2-5 mM each of GTP, ATP, CTP, and N1-methyl pseudo-UTP (Trilink); 10-25 mM ARCA (Trilink); 5 U/μL T7 RNA polymerase (NEB); 1 U/μL Murine RNase inhibitor (NEB); 0.004 U/μL Inorganic E. coli pyrophosphatase (NEB); and 1× reaction buffer. TURBO DNase (ThermoFisher) was added to a final concentration of 0.01 U/μL, and the reaction was incubated for an additional 30 minutes to remove the DNA template. The mRNA was purified using a MegaClear Transcription Clean-up kit (ThermoFisher) or a RNeasy Maxi kit (Qiagen) per the manufacturers' protocols. Alternatively, the mRNA was purified through a precipitation protocol, which in some cases was followed by HPLC-based purification. Briefly, after the DNase digestion, mRNA is purified using LiCl precipitation, ammonium acetate precipitation and sodium acetate precipitation. For HPLC purified mRNA, after the LiCl precipitation and reconstitution, the mRNA was purified by RP-IP HPLC (see, e.g., Kariko, et al. Nucleic Acids Research, 2011, Vol. 39, No. 21 e142). The fractions chosen for pooling were combined and desalted by sodium acetate/ethanol precipitation as described above. In a further alternative method, mRNA was purified with a LiCl precipitation method followed by further purification by tangential flow filtration. RNA concentrations were determined by measuring the light absorbance at 260 nm (Nanodrop), and transcripts were analyzed by capillary electrophoresis by Bioanlayzer (Agilent).

[0552] Nme2Cas9 mRNA was generated from plasmid DNA encoding an open reading frame according to SEQ ID NOs: 360 (see sequences in Table 5C). Streptococcus pyogenes (“Spy”) Cas9 mRNA was generated from plasmid DNA encoding an open reading frame according to SEQ ID NOs: 8, 11, or 23 (see sequences in Table 5C). BC22n mRNA was generated from plasmid DNA encoding an open reading frame according to SEQ ID NOs: 2 or 5. BC22 mRNA was generated from plasmid DNA encoding an open reading frame according to SEQ ID NO: 20. BC22 with 2×UGI mRNA was generated from plasmid DNA encoding an open reading frame according to SEQ ID No: 29. UGI mRNA was generated from plasmid DNA encoding an open reading frame according to SEQ ID NOs: 26 or 35. BE3 mRNA was generated from plasmid DNA encoding an open reading frame according to SEQ ID NO: 14 or 17. BE4Max mRNA was generated from plasmid DNA encoding an open reading frame according to SEQ ID NO: 32. When the sequences cited in this paragraph are referred to below with respect to RNAs, it is understood that Ts should be replaced with Us (which were N1-methyl pseudouridines as described above). Messenger RNAs used in the Examples include a 5′ cap and a 3′ polyadenylation region, e.g., up to 100 nts.

### 1.3. Next-Generation Sequencing (“NGS”) and Analysis for On-Target Editing Efficiency

[0553] Genomic DNA was extracted using QuickExtract™ DNA Extraction Solution (Lucigen, Cat. QE09050) according to the manufacturer's protocol. To quantitatively determine the efficiency of editing at the target location in the genome, deep sequencing was utilized to identify the presence of insertions and deletions introduced by gene editing. PCR primers were designed around the target site within the gene of interest (e.g., TRAC) and the genomic area of interest was amplified. Primer sequence design was done as is standard in the field.

[0554] Additional PCR was performed according to the manufacturer's protocols (Illumina) to add chemistry for sequencing. The amplicons were sequenced on an Illumina MiSeq instrument. The reads were aligned to the human reference genome (e.g., hg38) after eliminating those having low quality scores. Reads that overlapped the target region of interest were re-aligned to the local genome sequence to improve the alignment. Then the number of wild type reads versus the number of reads which contain C-to-T mutations, C-to-A/G mutations or indels was calculated. Insertions and deletions were scored in a 20 bp region centered on the predicted Cas9 cleavage site. Indel percentage is defined as the total number of sequencing reads with one or more base inserted or deleted within the 20 bp scoring region divided by the total number of sequencing reads, including wild type. C-to-T mutations or C-to-A/G mutations were scored in a 40 bp region including 10 bp upstream and 10 bp downstream of the 20 bp sgRNA target sequence. The C-to-T editing percentage is defined as the total number of sequencing reads with either one or more C-to-T mutations within the 40 bp region divided by the total number of sequencing reads, including wild type. The percentage of C-to-A/G mutations are calculated similarly.

### Example 1A—C-to-T Conversion

[0555] APOBEC3A deaminase-Cas9D10A editor was evaluated for efficiency of C-to-T conversion activity and the span of the C-to-T conversion window. C-to-T conversion activity and window results were compared against construct BC27 encoding BE3 (Komor A C, Kim Y B, Packer M S, Zuris J A, Liu D R. Programmable editing of a target base in genomic DNA without double-stranded DNA cleavage. Nature. 2016; 533(7603):420-424.) Constructs were each evaluated in triplicate against 5 sgRNA in a single experiment.

[0556] Plasmid A, using a pUC19 backbone (GenBank® Accession Number U47119), expresses an S. pyogenes single-guide RNA (sgRNA) from a U6 promoter. Plasmid B, called pCI, expresses base editor constructs from a CMV promoter which are comprised of the candidate deaminase fused to S. pyogenes-D10A-Cas9 by an XTEN linker which is subsequently fused to one copy of UGI and one copy of SV40 NLS. U-2OS cells growing in Dulbecco's Modified Eagle's Medium (DMEM) supplemented with 10% Fetal Bovine Serum (FBS) in 96-well plates were transfected using Mirus TransIT-X2® with 100 ng each of plasmid A and plasmid B. Cells were washed and resuspended in fresh media 24 hours after initial transfection. After an additional 48 hours, the media was removed and the cells were lysed with QuickExtract™ DNA Extraction Solution (Lucigen, Cat. QE09050).

[0557] Construct BC22 encoding the H. sapiens APOBEC3A deaminase (Uniprot ID P31941) in the fusion had significantly greater C-to-T conversion activity than BC27 encoding the rat APOBEC1 deaminase (Uniprot ID P38483) with more than one guide (sg000296: P value 0.0303; sg001373, P value 0.0263). The average activity of BC22 was comparable to that of BC27 across all guides (Table 6, FIGS. 1A-IE).

[0558] Across all 5 sgRNAs tested, BC22 was significantly more likely to convert all target cytosines to thymidines than BC27 (Table 7, FIGS. 2A-2E, P value<0.005). A target cytosine is any cytosine within positions 1-10 of the protospacer target sequence (underlined) or in first position 5′ of the target sequence The guide sequence for sg000296 is CCUUCCGAAAGAGGCCCCCC (SEQ ID NO: 156), and the locus has 4 target cytosines. The target guide sequence for sg001373 is UC̅C̅C̅UGGCUGAGGAUCCCCA (SEQ ID NO: 157), and the locus has 5 target cytosines, including the first position 5′ of the target sequence. The target guide sequence for sg001400 is ACUCACGAUGAAAUCCUGGA (SEQ ID NO: 158), and the locus has 4 target cytosines including the first position 5′ of the target sequence. The target guide sequence for sg003018 is GAGCCCCCCACUGUGGUGAC (SEQ ID NO: 160), and the locus has 6 target cytosines. The guide sequence for sg005883 is CCCCCCGCCGUGUUUGUGGG (SEQ ID NO: 159), and the locus has 8 target cytosines.

[0559] BC22 converted a significantly larger proportion and positional range of target cytosine than BC27 (FIGS. 3A-3E). converted a significantly larger proportion and positional range of target cytosines than BC27 (FIGS. 3A-3E). This wider C-to-T conversion window held true even for guides that BC22 had less total C-to-T conversion activity on such as sg001400, sg003018 (Table 7, Figure FIGS. 3C-3E).

TABLE 6
Percent of total reads containing at least 1 cytosine to
thymidine conversion. (n = 3)

| | sg000296 | | sg0001373 | | sg001400 | | sg003018 | | sg005883 | |
|---|---|---|---|---|---|---|---|---|---|---|
| Construct | Mean | SD | Mean | SD | Mean | SD | Mean | SD | Mean | SD |
| 1XNLS | 0.3 | 0.2 | 0.0 | 0.1 | 0.1 | 0.1 | 0.0 | 0.0 | 0.0 | 0.1 |
| Cas9 | | | | | | | | | | |
| 3XNLS | 0.1 | 0.1 | 0.1 | 0.1 | 0.0 | 0.1 | 0.0 | 0.0 | 0.0 | 0.0 |
| Cas9 | | | | | | | | | | |
| BC22 | 16.0 | 0.9 | 20.3 | 2.6 | 24.2 | 1.1 | 12.6 | 1.7 | 46.0 | 7.7 |
| BC27 | 14.2 | 0.3 | 13.0 | 2.6 | 30.6 | 1.4 | 19.6 | 1.9 | 40.8 | 5.2 |
| GFP | 0.1 | 0.1 | 0.1 | 0.1 | 0.2 | 0.1 | 0.1 | 0.1 | 0.2 | 0.1 |

TABLE 7
Percent of C-to-T edited reads in which all target cytosines
have been converted to thymidines (sg000296, sg001373,
sg001400, sg003018). For sg005883, percent of edited reads in which
at least 6 of 8 target cytosines have been converted to thymidines.

| | sg000296 | | sg001373 | | sg001400 | | sg003018 | | sg005883 | |
|---|---|---|---|---|---|---|---|---|---|---|
| Construct | Mean | SD | Mean | SD | Mean | SD | Mean | SD | Mean | SD |
| 1XNLS | 0 | 0 | n/d | n/d | 0 | 0 | 0 | 0 | 9.4 | 9.5 |
| Cas9 | | | | | | | | | | |
| 3XNLS | 0 | 0 | 0 | 0 | 0 | 0 | 0 | 0 | 7.0 | 3.9 |
| Cas9 | | | | | | | | | | |
| BC22 | 45.1 | 2.1 | 34.6 | 5.5 | 11.1 | 0.9 | 80.2 | 1.4 | 61.8 | 10.1 |
| BC27 | 0.6 | 0 | 3.3 | 0.3 | 0.1 | 0.2 | 43.2 | 6.7 | 15.2 | 4.8 |
| GFP | 0 | 0 | n/d | n/d | 0 | 0 | 0 | 0 | 0 | 0 |

(n/d = not done)

### Example 2—Effects of Base Excision Repair Genes on Editing

[0560] The effects of additional UGI gene expression in trans on C-to-T conversion activity relative to unwanted base excision repair activity were investigated in various cell lines.

[0561] U-2OS and HuH-7 cells grown in Dulbecco's Modified Eagle's Medium (DMEM) supplemented with 10% FBS in 96-well plates were co-transfected using Mirus TransIT-X2® with 100 ng of BC22 or BC27, 100 ng of another CMV-driven overexpression plasmid (pcDNA3.1) or a control plasmid (pMAX) and 6.25 pmol of single-guide G000297. The ORFs tested in tandem with BC22 and BC27 were green fluorescent protein (pMAX-GFP, negative control), Uracil DNA glycosylase (pCDNA3.1-UNG), Single-Strand-Selective Monofunctional Uracil-DNA Glycosylase 1 (pcDNA3.1-SMUG1) and Uracil Glycosylase Inhibitor (pCDNA3.1-UGI). UNG and SMUG1 are base excision repair proteins that remove uracil from DNA. UGI is the small protein that binds and inhibits UDG. It has been reported that when UGI is fused to the constructs it increases the rate of C-to-T mutations relative to the other outcomes of C-to-A/G mutations and indels (Liu et al, Nature 2016). To determine whether the addition of UNG transcript knockdown further enriched for C-to-T-only edits, an additional transfection condition included either BC22 or BC27, pcDNA3.1-UGI, G000297 and a pool of siRNA targeting UNG (Dharmacon, #M-011795-00). Three days after transfection, media was removed and the cells were lysed with QuickExtract™ DNA Extraction Solution (Lucigen, Cat. QE09050).

[0562] In HuH-7 cells, overexpressing base excision repair proteins UNG or SMUG1 with either BC22 or BC27 led to a 1.3-1.7-fold significant increase in the proportion of C-to-A/G mutations and indels relative to C-to-T only mutations when compared to overexpression of the negative control GFP (Table 11, FIG. 5B). Conversely, blocking UNG with UGI overexpression led to a 4.5-10.8-fold decrease in reads containing C-to-A/G mutations and indels with a significant 1.56-2.2-fold increase in C-to-T-only mutations (Table 11, FIG. 5B). Additional UGI overexpression led to, on average, 94% of total edits being C-to-T-only edits whether using BC22 or BC27 (FIG. 4B). Similar trends were seen with U-2OS (Table 8, Figure FIGS. 4A, 5A) with the one outstanding difference that SMUG1 and UNG overexpression did not lead to significant changes in relative proportions of editing outcomes. In both cell lines the addition of siRNAs targeting UNG gene to the UGI overexpression plasmid did not increase the proportion of C-to-T-only edits over UGI overexpression alone (Table 8). Finally, in both cell lines BC22 total C-to-T conversion activity was higher than BC27 (FIGS. 4A, 4B), suggesting BC22 has higher innate C-to-T conversion activity than BC27.

TABLE 8
Editing as a % of total reads in U-2OS cells (n = 3)

| U-2OS | | | | | | | |
|---|---|---|---|---|---|---|---|
| Con- | Overexpression/ | C-to-T % | | C-to-A/G % | | Indel % | |
| struct | SIRNA | Mean | SD | Mean | SD | Mean | SD |
| BC27 | GFP+ | 1.57 | 0.99 | 0.86 | 0.14 | 1.18 | 0.16 |
| | SMUG1+ | 2.13 | 0.45 | 2.4 | 0.39 | 2.59 | 0.09 |
| | UDG+ | 0.3 | 0.26 | 0.36 | 0.22 | 1.05 | 0.04 |
| | UGI+ | 4.77 | 0.75 | 0.29 | 0.08 | 0.8 | 0.34 |
| | siUDG, UGI+ | 4.9 | 0.75 | 0.22 | 0.05 | 0.76 | 0.03 |
| BC22 | GFP+ | 10.87 | 1.58 | 1.78 | 0.61 | 1.64 | 0.8 |
| | SMUG1+ | 6.17 | 0.4 | 6.21 | 1.42 | 4.85 | 0.9 |
| | UDG+ | 1.57 | 0.06 | 0.4 | 0.13 | 1.21 | 0.32 |
| | UGI+ | 12.7 | 1.93 | 0.24 | 0.13 | 0.86 | 0.05 |
| | siUDG, UGI+ | 16.97 | 0.93 | 0.36 | 0.25 | 0.9 | 0.04 |

TABLE 9
Fold change relative to GFP in % of edited reads in U-2OS cells

| | Overexpression/ | | | C-to-A/G | |
|---|---|---|---|---|---|
| Construct | siRNA | C-to-T | P value | or Indel | P value |
| BC27 | GFP+ | not applicable | | | |
| | SMUG1+ | −1.37 | 0.1953 | 1.20 | 0.1953 |
| | UDG+ | −1.75 | 0.0864 | 1.31 | 0.0864 |
| | UGI+ | 1.92 | 0.0091 | −3.09 | 0.0091 |
| | siUDG, UGI+ | 1.97 | 0.0042 | −3.48 | 0.0042 |
| BC22 | GFP+ | not applicable | | | |
| | SMUG1+ | −2.08 | 0.0004 | 2.67 | 0.0004 |
| | UDG+ | −1.52 | 0.0031 | 2.10 | 0.0031 |
| | UGI+ | 1.21 | 0.0048 | −2.97 | 0.0048 |
| | siUDG, UGI+ | 1.22 | 0.0041 | −3.46 | 0.0041 |

TABLE 10
Percent editing under different DNA repair pathway
conditions in HuH-7 cells

| HuH-7 | | | | | | | |
|---|---|---|---|---|---|---|---|
| | Over- | | | | | | |
| Con- | expression/ | C-to-T % | | C-to-A/G % | | Indel % | |
| struct | SIRNA | Mean | SD | Mean | SD | Mean | SD |
| BC27 | GFP+ | 18.70 | 0.70 | 13.24 | 0.95 | 10.55 | 1.11 |
| | SMUG1+ | 9.57 | 1.91 | 14.78 | 1.64 | 13.23 | 1.24 |
| | UDG+ | 4.57 | 0.46 | 7.45 | 0.23 | 7.74 | 0.49 |
| | UGI+ | 42.40 | 2.10 | 0.82 | 0.34 | 1.88 | 0.47 |
| | SiUDG, UGI+ | 41.37 | 2.73 | 0.94 | 0.37 | 1.32 | 0.30 |
| BC22 | GFP+ | 41.77 | 2.30 | 15.02 | 0.73 | 15.00 | 1.06 |
| | SMUG1+ | 19.20 | 1.61 | 21.89 | 2.17 | 25.98 | 1.86 |
| | UDG+ | 12.97 | 1.89 | 8.27 | 0.82 | 12.11 | 1.14 |
| | UGI+ | 64.53 | 1.32 | 2.50 | 0.30 | 4.05 | 1.45 |
| | SiUDG, UGI+ | 65.33 | 2.28 | 2.05 | 1.45 | 4.24 | 1.53 |

TABLE 11
Fold change relative to GFP in % of edited reads in Huh-7 cells

| | Overexpression/ | | | C-to-A/G | |
|---|---|---|---|---|---|
| Construct | siRNA | C-to-T | P value | or indel | P value |
| BC27 | GFP+ | not applicable | | | |
| | SMUG1+ | −1.73 | 0.0014 | 1.33 | 0.001 |
| | UDG+ | −1.86 | <0.0001 | 1.37 | <0.0001 |
| | UGI+ | 2.13 | <0.0001 | −9.30 | <0.0001 |
| | siUDG, UGI+ | 2.15 | <0.0001 | −10.81 | <0.0001 |
| BC22 | GFP+ | not applicable | | | |
| | SMUG1+ | −2.03 | <0.0001 | 1.71 | <0.0001 |
| | UDG+ | −1.50 | 0.0001 | 1.46 | 0.0001 |
| | UGI+ | 1.56 | <0.0001 | −4.53 | <0.0001 |
| | siUDG, UGI+ | 1.57 | <0.0001 | −4.76 | <0.0001 |

### Example 3—UGI mRNA Titration in T Cells

[0563] The mRNA encodes a fusion protein, BC22n (SEQ ID NO: 3), which is, from N-terminus to C-terminus, a H. sapiens APOBEC3A, an XTEN linker, a D10ACas9 nickase, a linker, and an SV40 NLS. Notably the BC22n polypeptide lacks a UGI. T cells were edited with BC22n using and a variable amount of UGI mRNA to determine the impact of trans UGI levels on editing profile. This experiment was performed using 2 different UGI mRNAs each encoding the same protein using a different open reading frame (SEQ ID Nos: 26 and 35).

### 3.1 T Cell Preparation

[0564] Healthy human donor apheresis was obtained commercially (Hemacare), and cells were washed and re-suspended in CliniMACS® PBS/EDTA buffer (Miltenyi Biotec Cat. No. 130-070-525) on the LOVO device. T cells were isolated via positive selection using CD4 and CD8 magnetic beads (Miltenyi Biotec Cat. No. 130-030-401/130-030-801) using the CliniMACS® Plus and CliniMACS® LS disposable kit. T cells were aliquoted into vials and cryopreserved in a 1:1 formulation of Cryostor® CS10 (StemCell Technologies Cat. No. 07930) and Plasmalyte A (Baxter Cat. No. 2B2522X) for future use. Upon thaw, T cells were plated at a density of 1.0×10\hat{ }6 cells/mL in T cell basal media composed of X-VIVO 15™ serum-free hematopoietic cell medium (Lonza Bioscience) containing 5% (v/v) of fetal bovine serum, 50 μM of 2-Mercaptoethanol, 10 mM of N-Acetyl-L-(+)-cysteine, 10 U/mL of Penicillin-Streptomycin, in addition to 1× cytokines (200 U/mL of recombinant human interleukin-2, 5 μg/mL of recombinant human interleukin-7 and 5 μg/mL of recombinant human interleukin-15). T cells were activated with TransAct™ (1:100 dilution, Miltenyi Biotec). Cells were expanded in T cell basal media for 72 hours prior to electroporation.

[0565] 3.2 Electroporation of T Cells Using mRNA and sgRNA

[0566] A solution containing mRNAs encoding BC22n (SEQ ID NO: 2) and one species of UGI (SEQ ID NO: 26 or 35) was prepared in sterile water. 50 μM TRAC targeting sgRNA G016017 (SEQ ID NO: 184) were removed from their storage plates and denatured for 2 minutes at 95° C. before cooling on ice. Seventy-two hours post activation, T cells were harvested, centrifuged, and resuspended at a concentration of 12.5×10\hat{ }6 T cells/mL in P3 electroporation buffer (Lonza). For each well to be electroporated, 1×10\hat{ }5 T cells were mixed with 200 ng of BC22n mRNA, 20 pmols of sgRNA and UGI mRNA ranging from 0.02 ng to 26 ng (dilution factor of 12.24), in a final volume of 20 μL of P3 electroporation buffer. This mRNA+sgRNA+T cell mix was transferred in triplicate to a 96-well Nucleofector™ plate and electroporated using the manufacturer's pulse code. Electroporated T cells were immediately rested in 80 μL of T cell basal media without cytokines for 10 minutes before being transferred to a new flat-bottom 96-well plate containing an additional 100 μL of T cell basal media with 2× concentration of cytokines. Electroporated T cells were subsequently cultured for 3 additional days and were collected for NGS sequencing as described in Example 1.

[0567] The constant dose of 200 ng of BC22n mRNA drove high total editing (>92%) across all conditions (Tables 12 and 13, sum of indel, C-to-A/G and C-to-T). The proportion of edits that were C-to-T-only increased in a dose-responsive manner to UGI mRNA concentration in the electroporation. At the highest dose of either UGI mRNAs SEQ ID NOs: 25 or 34, the percentage of sequencing reads containing indels and C-to-A/G mutations dropped to 7.4±0.4, 7.4±0.6 and 2.9±0.2, 3.6±0.3, respectively (Tables 12 and 13).

TABLE 12
Editing as percent of total reads with UGI
mRNA (SEQ ID NO: 26)

| | % Editing | | | | | |
|---|---|---|---|---|---|---|
| UGI mRNA | Indel | | C-to-A/G | | C-to-T | |
| (ng) | Mean | SD | Mean | SD | Mean | SD |
| Untreated | 0.2 | 0.1 | 2.1 | 0.0 | 0.2 | 0.0 |
| 0.000 | 51.2 | 0.8 | 27.2 | 0.4 | 18.3 | 0.3 |
| 0.025 | 50.0 | 1.1 | 28.2 | 0.6 | 18.6 | 0.6 |
| 0.051 | 48.2 | 2.0 | 28.4 | 0.3 | 19.0 | 1.0 |
| 0.102 | 49.8 | 0.5 | 28.1 | 0.3 | 18.7 | 0.8 |
| 0.203 | 49.5 | 1.1 | 27.9 | 0.6 | 18.7 | 0.3 |
| 0.406 | 47.7 | 2.0 | 27.5 | 0.5 | 19.4 | 0.7 |
| 0.813 | 47.8 | 0.6 | 28.0 | 0.5 | 19.5 | 0.9 |
| 1.625 | 47.9 | 0.1 | 26.6 | 0.5 | 21.5 | 0.3 |
| 3.250 | 41.9 | 0.6 | 24.7 | 0.8 | 28.9 | 0.7 |
| 6.500 | 30.0 | 0.5 | 21.1 | 0.6 | 44.1 | 1.0 |
| 13.000 | 18.7 | 2.6 | 15.5 | 0.6 | 58.3 | 1.0 |
| 26.000 | 7.4 | 0.4 | 7.4 | 0.6 | 80.1 | 2.1 |

TABLE 13
Editing as percent of total reads with UGI
mRNA (SEQ ID NO: 35)

| | % Editing | | | | | |
|---|---|---|---|---|---|---|
| UGI mRNA | Indel | | C-to-A/G | | C-to-T | |
| (ng) | Mean | SD | Mean | SD | Mean | SD |
| Untreated | 0.2 | 0.1 | 2.1 | 0.0 | 0.2 | 0.0 |
| 0.000 | 51.2 | 0.8 | 27.2 | 0.4 | 18.3 | 0.3 |
| 0.025 | 48.2 | 1.7 | 27.0 | 0.7 | 19.0 | 0.5 |
| 0.051 | 48.7 | 1.3 | 27.3 | 0.7 | 19.4 | 0.4 |
| 0.102 | 47.5 | 2.3 | 27.1 | 0.2 | 18.5 | 0.5 |
| 0.203 | 49.7 | 1.3 | 27.4 | 0.9 | 18.7 | 0.7 |
| 0.406 | 49.4 | 0.7 | 28.0 | 0.6 | 19.4 | 0.4 |
| 0.813 | 47.1 | 2.3 | 26.6 | 2.2 | 19.6 | 0.5 |
| 1.625 | 43.8 | 2.5 | 27.3 | 2.0 | 25.2 | 1.0 |
| 3.250 | 33.1 | 3.0 | 22.8 | 0.8 | 38.4 | 0.7 |
| 6.500 | 24.0 | 0.4 | 18.2 | 0.3 | 53.9 | 0.8 |
| 13.000 | 11.2 | 1.9 | 10.5 | 0.6 | 73.1 | 1.6 |
| 26.000 | 2.9 | 0.2 | 3.6 | 0.3 | 89.1 | 1.6 |

### Example 4: In Vivo Editing with UGI in Cis

[0568] LNPs formulated with editor mRNA and sgRNA G000282 at a 1:1 RNA weight ratio were tested for editing efficacy and editing outcomes in vivo. Experimental groups included TSS buffer only; mRNA encoding cleavase-spCas9 (SEQ ID NO: 8), mRNA encoding BC22 which includes human APOBEC3A fused to D10A SpyCas9 and one copy of UGI (SEQ ID NO: 20); and mRNAs encoding BE3 which includes rat APOBEC1 fused to D10A SpyCas9 and one copy of UGI (SEQ ID NOs: 14 and 17).

[0569] CD-1 female mice ranging from 6-10 weeks of age (n=5/group) were used in this study. LNPs were administered intravenously via tail vein injection at a dose of 1 mg/kg of total RNA to body weight. The animals were periodically observed for adverse effects for at least 24 hours post dose. Six days after treatment, animals were euthanized by cardiac puncture under isoflurane anesthesia; blood and liver tissue were collected for downstream analysis. Blood was collected into serum separator tubes or into tubes containing buffered sodium citrate for plasma. Liver punches weighting between 5 and 15 mg were collected for isolation of genomic DNA and total RNA.

[0570] Table 14 and FIG. 7A describe the editing results in mouse liver. The construct containing human APOBEC3A (BC22) showed total editing levels comparable to those of the Cas9 cleavase construct, while the rat APOBEC1 (BE3) constructs showed less than half that total editing activity. The construct containing human APOBEC3A also achieved more than twice the absolute percentage of C-to-T base conversion compared to the rat APOBEC1 constructs (BE3).

TABLE 14
TTR editing in liver tissue

| | % Editing | | | | | |
|---|---|---|---|---|---|---|
| | C-to- T | | C-to-A/G | | Indel | |
| Editor | Mean | SD | Mean | SD | Mean | SD |
| TSS | 0.15 | 0.04 | 1.95 | 0.26 | 0.31 | 0.11 |
| Cas9 (SEQ | 0.05 | 0.02 | 0.72 | 0.23 | 69.59 | 1.28 |
| ID NO: 8) | | | | | | |
| BE3 (SEQ ID | 16.53 | 7.49 | 8.69 | 3.01 | 4.31 | 1.79 |
| NO: 14) | | | | | | |
| BE3 (SEQ ID | 10.23 | 2.72 | 7.41 | 1.90 | 4.71 | 1.92 |
| NO: 17) | | | | | | |
| BC22 (SEQ | 45.75 | 1.17 | 4.98 | 0.49 | 22.0 | 1.82 |
| ID NO: 20) | | | | | | |

(Indel = insertions or deletions;
SD = standard deviation)

### Example 5—In Vivo Editing with UGI in Trans

[0571] In vivo editing profiles of deaminase containing constructs were compared to Cas9 when UGI was delivered in trans (as a separate mRNA). The constructs used encoded a fusion protein including D10A SpyCas9 with a deaminase. Further, gene expression differences between these editing conditions were analyzed through transcriptomic analysis.

### 5.1 In Vivo Editing as Assayed by NGS

[0572] Forty-five commercially available CD-1 female mice ranging from 6-10 weeks of age (n=5 per group) were used in this study. Animals were weighed pre-dose for dosing calculations. Each RNA species was formulated separately in an LNP. Formulations containing editor mRNA, UGI mRNA and sgRNA were mixed in a w/w ratio of RNA cargos of 6:3:2 (editor mRNA:sgRNA:UGI mRNA). The formulation mixture for Group 3 contained only editor mRNA and sgRNA and these were mixed in a w/w ratio of 2:1 (editor mRNA:sgRNA). Apart from the negative control group, which was dosed with TSS buffer only, all groups received sgRNA G000282. Formulations were administered intravenously via tail vein injection according to the doses listed in Table 15. Animals were periodically observed for adverse effects for at least 24 hours post-dose. Six days after treatment, animals were euthanized by cardiac puncture under isoflurane anesthesia; liver tissue were collected for downstream analysis. Liver punches weighing between 5 and 15 mg were collected for isolation of genomic DNA and total RNA. Genomic DNA samples were analyzed with NGS sequencing as described in Example 1.

TABLE 15
Animal groups and the respective LNPs.

| | | Editor mRNA + |
|---|---|---|
| Sample | LNP cargos | sgRNA dose (mg/kg) |
| TSS | None | 0 |
| Cas9, UGI | Cas9 (SEQ ID NO: 11) | 0.3 mg/kg |
| | UGI (SEQ ID NO: 26) | |
| | G0000282 | |
| BC22n | BC22n (SEQ ID NO: 2) | 0.3 mg/kg |
| | G0000282 | |
| BC22n, UGI | BC22n (SEQ ID NO: 2) | 0.3 mg/kg |
| | UGI (SEQ ID NO: 26) | Or |
| | G0000282 | 0.1 mg/kg |

[0573] Editing data are shown in Table 16 and FIG. 8. Treatment with Cas9 mRNA led to 58.2% editing of the Ttr gene. Animals treated with BC22n mRNA in the absence of UGI mRNA in trans displayed 29.26% C-to-T conversions and 28% indel, while those treated with BC22n and UGI mRNA showed a higher C-to-T editing purity (56.67% C-to-T conversions and only 5.6% indel).

[0574] Lowering the lipid dose from 0.3 to 0.1 mg/kg led to lower editing levels 31.39% C-to-T conversions and 3.67% indel).

TABLE 16
Ttr editing levels in mice treated with different LNP
combinations

| | | | mRNA(s) | | | | |
|---|---|---|---|---|---|---|---|
| | | | | Cas9, | | BC22n, | BC22n, |
| | | | TSS | UGI | BC22n | UGI | UGI |
| | | | Dose (editor + sgRNA) | | | | |
| | | | | 0.3 | 0.3 | 0.3 | 0.1 |
| | | | 0 | mg/kg | mg/kg | mg/kg | mg/kg |
| % Ttr | C-to- | Average | 0.2% | 0.1% | 29.3% | 56.7% | 31.4% |
| Editing | T | SD | 0.0% | 0.1% | 5.7% | 2.9% | 4.9% |
| | C-to- | Average | 0.5% | 0.3% | 8.1% | 1.8% | 1.7% |
| | A/G | SD | 0.1% | 0.1% | 1.3% | 0.2% | 0.1% |
| | Indel | Average | 0.2% | 58.2% | 28.0% | 5.7% | 3.7% |
| | | SD | 0.0% | 4.0% | 5.0% | 0.5% | 0.1% |
| | | SD | 14.1% | 6.7% | 9.6% | 3.5% | 9.0% |

(SD = standard deviation).

### 5.2 Whole Transcriptome Sequencing

[0575] Liver punches were mixed with 800 μL of TRIzol reagent (Thermo Fisher Scientific, Cat No. 15596026) in Lysing Matrix D tubes (MPBio, Cat. No. 116913100) which contain ceramic beads. Tissue was homogenized in a bead beater for 45 seconds and transferred to ice. Lysing Matrix D tubes were spun down at maximum speed for 5 min at 4C and ˜600 μL of TRIzol (without tissue debris) was mixed with an equal volume of absolute ethanol. The mixture was loaded in the Directzol RNA miniprep column (Zymo Research, Cat No. R2051) and RNA was extracted following the manufacturer's protocol. Purified RNA samples were quantified in a NanoDrop™ 8000 spectrophotometer (Thermo Fisher Scientific) and diluted to 41.67 ng/μL using nuclease-free water. From each experimental group, 2 samples were randomly chosen for further transcriptomic analysis. 500 ng (12 μL) of purified total RNA were depleted of ribosomal RNA (rRNA) components using the NEBNext® rRNA Depletion Kit (New England Biolabs, Cat. No. E6350L) according to the manufacturer's instructions. rRNA-depleted samples were converted into double-stranded DNA libraries using NEBNext® Ultra™ II Directional RNA Library Prep Kit for Illumina® (New England Biolabs, Cat No. E7765S) following the manufacturer's protocol. Amplified libraries were quantified in a Qubit 4 fluorometer and the average fragment size of each library was obtained by capillary electrophoresis. Libraries were pooled at an equimolar concentration of 4 nM and pair-end sequenced using a high-output 300-cycle kit (Illumina, Cat No. 20024908) in a NextSeq550 sequencing platform (Illumina).

[0576] Data Processing for Differential Gene Expression Analysis

[0577] Sequencing reads in FASTQ format were generated and demultiplexed using the bcl2fastq program (Illumina, v2.20). Reads were assigned to a sample if the Hamming distance (Hamming, R. W. Bell Syst. Tech. J. 29, 147-160) between each index read and the sample indexes was less than or equal to one. The sequencing quality was examined with FastQC program (v0.11.9) (Andrews S. Babraham Inst.). Ribosomal RNA reads were identified by aligning all reads to human rRNA sequences (GenBank U13369.1) with Bowtie2 (v2.3.5.1) (Langmead, B. and Salzberg, S. L. Nat. Methods 9, 357-359). Transcriptome quantification was performed using Salmon (v0.14.1) (Patro R., et al. Nat. Methods 14, 417-419) with non-ribosomal RNA reads. Differential gene expression analysis was carried out using DESeq2 (v1.26.0) (Love, M. I., et al. Genome Biol. 15, 550) on the outputs of Salmon. Genes or transcripts with Benjamini-Hochberg adjusted p-values less than 0.05 were determined to be differentially expressed.

[0578] RNA-Seq analysis revealed that treatment with BC22n mRNA and UGI mRNA in trans led to only 53 differentially expressed genes, compared to 223 events in those animals treated with BC22n alone (i.e. no UGI mRNA) and 127 events in animals treated with both Cas9 and UGI mRNA in trans (FIGS. 9A-9C).

### Example 6—Editing in T Cells with UGI in Trans

[0579] 6.1 Editing in T Cells

[0580] T cells were edited at the CIITA locus with UGI in trans and either BC22n or Cas9 to assess the impact on editing type on MHC II antigens.

[0581] Healthy human donor apheresis was obtained commercially (Hemacare), and cells were washed and re-suspended in CliniMACS® PBS/EDTA buffer (Miltenyi Biotec Cat. No. 130-070-525) on the LOVO device. T cells were isolated via positive selection using CD4 and CD8 magnetic beads (Miltenyi Biotec Cat. No. 130-030-401/130-030-801) using the CliniMACS® Plus and CliniMACS® LS disposable kit. T cells were aliquoted into vials and cryopreserved in a 1:1 formulation of Cryostor® CS10 (StemCell Technologies Cat. No. 07930) and Plasmalyte A (Baxter Cat. No. 2B2522X) for future use. Upon thaw, T cells were plated at a density of 1.0×10\hat{ }6 cells/mL in T cell basal media composed of X-VIVO 15™ serum-free hematopoietic cell medium (Lonza Bioscience) containing 5% (v/v) of fetal bovine serum, 50 μM of 2-Mercaptoethanol, 10 mM of N-Acetyl-L-(+)-cysteine, 10 U/mL of Penicillin-Streptomycin, in addition to 1× cytokines (200 U/mL of recombinant human interleukin-2, 5 μg/mL of recombinant human interleukin-7 and 5 μg/mL of recombinant human interleukin-15). T-cells were activated with TransAct™ (1:100 dilution, Miltenyi Biotec). Cells were expanded in T cell basal media containing TransAct™ for 72 hours prior to electroporation.

### Electroporation of T Cells

[0582] A solution containing mRNAs encoding Cas9 (SEQ ID NO. 11), BC22n (SEQ ID NO: 2) or UGI (SEQ ID NO: 26) was prepared in sterile water. 50 μM CIITA sgRNAs were removed from their storage plates and denatured for 2 minutes at 95° C. before cooling on ice. Seventy-two hours post activation, T cells were harvested, centrifuged, and resuspended at a concentration of 12.5×10\hat{ }6 T cells/mL in P3 electroporation buffer (Lonza). For each well to be electroporated, 1×10\hat{ }5 T cells were mixed with 200 ng of editor mRNA, 200 ng of UGI mRNA and 20 pmols of sgRNA as described in Table 17 in a final volume of 20 uL of P3 electroporation buffer. This mix was transferred in triplicate to a 96-well Nucleofector™ plate and electroporated using the manufacturer's pulse code. Electroporated T cells were immediately rested in 80 μL of T cell basal media without cytokines for 10 minutes before being transferred to a new flat-bottom 96-well plate containing an additional 100 μL of T cell basal media supplemented with 2× cytokines. The resulting plate was incubated at 37° C. for 4 days. After 96 hours, T cells were diluted 1:3 into fresh T cell basal media with 1× cytokines. Electroporated T cells were subsequently cultured for 3 additional days and were collected for flow cytometry analysis, NGS sequencing, and transcriptomics as described in Example 1.

### Flow Cytometry and NGS Sequencing

[0583] On day 7 post-editing, T cells were phenotyped by flow cytometry to determine MHC class II protein expression. Briefly, T cells were incubated in a cocktail of antibodies targeting HLA-DR, DQ, DP-PE (BioLegend® Cat. No. 361704) and Isotype Control-PE (BioLegend® Cat. No. 400234). Cells were subsequently washed, processed on a Cytoflex flow cytometer (Beckman Coulter) and analyzed using the FlowJo software package. T cells were gated based on size, shape, viability, and MHC II expression. DNA samples were subjected to PCR and subsequent NGS analysis, as described in Example 1. Table 17 and FIG. 10 show CIITA gene editing. For both Cas9 and BC22n conditions, total editing went to near completion, above 95%. Table 17 and FIG. 11 show MHC class II protein expression following electroporation with UGI mRNA combined with Cas9 or BC22n mRNA. For G018117, editing with BC22n lead to 80.50% MHC II negative cells, P while editing with Cas9 lead to 51.63% MHC II antigen negative cells.

TABLE 17
CIITA editing in T cells presented at a percentage of total
NGS reads; Flow cytometry assessment of the percentage
of cells lacking surface markers HLA DQ/DP/DR

| | | % C-to-T | | % C-to-A/G | | % Indel | | % MHC II neg | | |
|---|---|---|---|---|---|---|---|---|---|---|
| Editor | Guide | Mean | SD | Mean | SD | Mean | SD | Mean | SD | N |
| Cas9 | G018117 | 0.0 | 0.0 | 0.1 | 0.0 | 98.0 | 0.2 | 70.3 | 1.5 | 3 |
| | G018118 | 0.0 | 0.0 | 0.1 | 0.1 | 97.5 | 0.5 | 73.7 | 0.5 | 3 |
| | G018120 | 0.1 | 0.1 | 0.2 | 0.0 | 92.3 | 0.3 | 83.1 | 1.1 | 3 |
| | G018076 | 0.0 | 0.0 | 0.1 | 0.0 | 98.3 | 0.1 | 62.8 | 1.1 | 3 |
| | G018100 | 0.0 | 0.0 | 0.1 | 0.0 | 98.9 | 0.2 | 84.1 | 1.3 | 3 |
| | G018091 | 0.0 | 0.0 | 0.0 | 0.0 | 99.4 | 0.2 | 96.2 | 0.4 | 3 |
| | No guide | not reported | | | | | | 10.5 | 0.0 | 1 |
| BC22n | G018117 | 95.7 | 0.2 | 2.3 | 0.1 | 1.1 | 0.1 | 99.2 | 0.1 | 3 |
| | G018118 | 95.8 | 0.3 | 2.3 | 0.1 | 1.2 | 0.3 | 99.0 | 0.1 | 3 |
| | G018120 | 95.7 | 0.5 | 2.6 | 0.4 | 0.7 | 0.1 | 99.0 | 0.1 | 3 |
| | G018076 | 96.5 | 0.4 | 1.2 | 0.2 | 1.1 | 0.3 | 98.5 | 0.2 | 3 |
| | G018100 | 90.7 | 0.3 | 2.8 | 0.3 | 5.1 | 0.7 | 95.7 | 0.6 | 3 |
| | G018091 | 95.4 | 0.6 | 2.8 | 0.1 | 1.1 | 0.3 | 98.7 | 0.2 | 3 |

| | | | | |
|---|---|---|---|---|
| No guide | not reported | 10.8 | 0.0 | 1 |

### 6.2—Gene Expression Analysis in T Cells

### Whole Transcriptome Sequencing

[0584] On day 7 post-editing, T cells treated with G018117 and G18078 were harvested and preserved at −80 C for future processing. Total RNA was extracted from samples in TRIzol™ reagent using the Direct-zol RNA microprep kit (Zymo Research, Cat No. R2062) following the manufacturer's protocol. Purified RNA samples were quantified in a NanoDrop™ 8000 spectrophotometer (Thermo Fisher Scientific) and diluted to 41.67 ng/μL using nuclease-free water. From each experimental triplicate shown in FIGS. 13A-15B, samples per group were randomly chosen for transcriptomic analysis. 500 ng (12 μL) of purified total RNA were depleted of ribosomal RNA (rRNA) components using the NEBNext® rRNA Depletion Kit (New England Biolabs, Cat. No. E6350L) according to the manufacturer's instructions. rRNA-depleted samples were converted into double-stranded DNA libraries using NEBNext® Ultra™ II Directional RNA Library Prep Kit for Illumina® (New England Biolabs, Cat No. E7765S) following the manufacturer's protocol. Amplified libraries were quantified in a Qubit 4 fluorometer and the average fragment size of each library was obtained by capillary electrophoresis. Libraries were pooled at an equimolar concentration of 4 nM and pair-end sequenced using a high-output 300-cycle kit (Illumina, Cat No. 20024908) in a NextSeq550 sequencing platform (Illumina).

### Data Processing for Differential Gene Expression Analysis

[0585] Sequencing reads in FASTQ format were generated and demultiplexed using the bcl2fastq program (Illumina, v2.20). Reads were assigned to a sample if the Hamming distance (Hamming, R. W. Bell Syst. Tech. J. 29, 147-160) between each index read and the sample indexes was less than or equal to one. The sequencing quality was examined with FastQC program (v0.11.9) (Andrews S. Babraham Inst.). Ribosomal RNA reads were identified by aligning all reads to human rRNA sequences (GenBank U13369.1) with Bowtie2 (v2.3.5.1) (Langmead, B. and Salzberg, S. L. Nat. Methods 9, 357-359). Transcriptome quantification was performed using Salmon (v0.14.1) (Patro R., et al. Nat. Methods 14, 417-419) with non-ribosomal RNA reads. Differential gene expression analysis was carried out using DESeq2 (v1.26.0) (Love, M. I., et al. Genome Biol. 15, 550) on the outputs of Salmon. Genes or transcripts with Benjamini-Hochberg adjusted p-values less than 0.05 were determined to be differentially expressed. Lists of differentially expressed genes were analyzed in terms of gene ontology using Metascape (Zhou, Y., et al. Nat. Comm. 10, 1523). Protein-protein interactions were determined using the BioGrid, InWeb_IM and OmniPath8 databases (Li, T., et al. Nat. Methods 14, 61-64; Stark, C., et al. Nucleic Acids Res. 34, 535-539; Tilrei, D., et al. Nat. Methods 13, 966-967). Densely connected networks were identified using the molecular complex detection (MCODE) algorithm (Bader, G. D., et al. BMC Bioinformatics 4, 1-27) and the three best-scoring terms by p-value were retained as the functional description of the corresponding network components.

[0586] Compared to samples treated with Cas9 mRNA, T cells electroporated with BC22n mRNA displayed a significantly stronger downregulation of MHC class II genes and the HLA-associated CD74 gene (Table 18 and 19). Minimal effects on class I MHC genes were observed (Table 20 and Table 21). In terms of transcriptome-wide differential gene expression events, treatment with BC22n mRNA led to fewer differentially expressed genes (p. adjusted<0.05) when compared to Cas9 mRNA. In T cells electroporated with sgRNA G018076, a total of 553 and 65 differential gene expression events were observed for Cas9 and BC22n mRNA treatments, respectively (FIGS. 12A-12B). A similar trend was observed in T cells electroporated with sgRNA G018117, which displayed 303 and 30 differential gene expression events when treated with Cas9 and BC22n mRNA, respectively (FIGS. 13A-13B). Fewer protein-protein interaction networks were identified among the list of differentially expressed genes in T cells treated with BC22n mRNA when compared to those treated with Cas9 mRNA (FIGS. 14A-14B and 15A-15B).

TABLE 18
Differential gene expression of class II HLA genes in T cells

| | G018076 sgRNA | | | | G018117 sgRNA | | | |
|---|---|---|---|---|---|---|---|---|
| | | | BC22n | | Cas9 | | | |
| | Cas9 vs control | | vs control | | vs control | | BC22n vs control | |
| | Fold | | Fold | | Fold | | Fold | |
| Gene | change | p. adj. | change | p. adj. | change | p. adj. | change | p. adj. |
| CD74 | 0.446 | *** | 0.116 | *** | 0.360 | *** | 0.100 | *** |
| HLA-DMA | 0.457 | *** | 0.150 | *** | 0.356 | *** | 0.146 | *** |
| HLA-DMB | 0.363 | *** | 0.113 | *** | 0.267 | *** | 0.091 | *** |
| HLA-DOA | 0.450 | *** | 0.299 | *** | 0.420 | *** | 0.280 | *** |
| HLA-DPA1 | 0.474 | *** | 0.181 | *** | 0.385 | *** | 0.170 | *** |
| HLA-DPB1 | 0.381 | *** | 0.087 | *** | 0.300 | *** | 0.073 | *** |
| HLA-DQA1 | 0.316 | *** | 0.017 | *** | 0.214 | *** | 0.009 | *** |
| HLA-DQA2 | 0.215 | *** | 0.007 | *** | 0.221 | *** | 0.011 | *** |
| HLA-DQB1 | 0.383 | *** | 0.069 | *** | 0.290 | **** | 0.069 | *** |
| HLA-DQB1- | 0.323 | *** | 0.102 | *** | 0.311 | *** | 0.097 | *** |
| AS1 | | | | | | | | |
| HLA-DRA | 0.288 | *** | 0.004 | *** | 0.205 | *** | 0.002 | *** |
| HLA-DRB1 | 0.287 | *** | 0.029 | *** | 0.207 | *** | 0.027 | *** |
| HLA-DRB3 | 0.268 | *** | 0.012 | *** | 0.219 | *** | 0.004 | *** |
| HLA-DRB4 | 0.282 | *** | 0.024 | *** | 0.224 | *** | 0.026 | *** |

(ns = not significant,
* = p. adj. < 0.05,
** = p. adj. < 0.01,
*** = p. adj. < 0.001).
For transcript quantification data, refer to Table 19.

TABLE 19
Transcript quantification of the expression of class II
HLA genes in T cells. Each square contains the
average number of transcripts from a given
gene per one million of mRNA molecules. For statistical
significance, please refer to Table 19.

| | | G0188117 | | G018076 | |
|---|---|---|---|---|---|
| Guide | none | Cas9 | BC22n | Cas9 | BC22n |
| mRNAs | UGI | UGI | UGI | UGI | UGI |
| CD74 | 385 | 154 | 38 | 174 | 45 |
| HLA-DMA | 27 | 11 | 4 | 12 | 4 |
| HLA-DMB | 11 | 3 | 1 | 4 | 1 |
| HLA-DOA | 3 | 2 | 1 | 2 | 1 |
| HLA-DPA1 | 70 | 30 | 12 | 34 | 13 |
| HLA-DPB1 | 16 | 5 | 1 | 6 | 1 |
| HLA-DQA1 | 12 | 3 | 0 | 4 | 0 |
| HLA-DQA2 | 3 | 1 | 0 | 1 | 0 |
| HLA-DQB1 | 60 | 19 | 4 | 23 | 4 |
| HLA-DQB1-AS1 | 9 | 3 | 1 | 3 | 1 |
| HLA-DRA | 120 | 27 | 0 | 35 | 1 |
| HLA-DRB1 | 117 | 27 | 3 | 34 | 3 |
| HLA-DRB3 | 17 | 4 | 0 | 5 | 0 |
| HLA-DRB4 | 13 | 3 | 0 | 4 | 0 |

TABLE 20
Differential gene expression of class I HLA genes in T cells
harvested 7 days post-treatment with different mRNA
combinations and CIITA-targeting sgRNAs

| | G018076 sgRNA | | | | G018117 sgRNA | | | |
|---|---|---|---|---|---|---|---|---|
| | Cas9 | | BC22n | | Cas9 | | BC22n | |
| | vs control | | vs control | | vs control | | vs control | |
| | Fold | p. | Fold | p. | Fold | p. | Fold | p. |
| Gene | change | adj. | change | adj. | change | adj. | change | adj. |
| HLA-A | 0.995 | ns | 0.910 | * | 0.969 | ns | 0.926 | ns |
| HLA-B | 1.001 | ns | 0.881 | ** | 1.043 | ns | 0.913 | ns |
| HLA-C | 1.013 | ns | 0.917 | ns | 0.995 | ns | 0.922 | ns |
| HLA-E | 0.925 | ns | 0.919 | ns | 0.870 | *** | 0.949 | ns |
| HLA-F | 0.897 | ns | 0.812 | ** | 0.930 | ns | 0.891 | ns |

(ns = not significant,
* = p. adj. < 0.05,
** = p. adj. < 0.01,
*** = p. adj. < 0.001).
For transcript quantification data, refer to Table 21.

TABLE 21
Transcript quantification of the expression of class I HLA
genes in T cells. Each square contains the average
number of transcripts from a given gene
per one million of mRNA molecules. For statistical
significance, please refer to Table 20.

| | | G0188117 | | G018076 | |
|---|---|---|---|---|---|
| Guide | none | Cas9 | BC22n | Cas9 | BC22n |
| mRNAs | UGI | UGI | UGI | UGI | UGI |
| HLA-A | 880 | 947 | 797 | 887 | 814 |
| HLA-B | 457 | 528 | 407 | 463 | 409 |
| HLA-C | 479 | 528 | 430 | 490 | 445 |
| HLA-E | 166 | 161 | 154 | 156 | 155 |
| HLA-F | 68 | 70 | 59 | 61 | 56 |

### Example 7—Editing Assessment at APOBEC3A Hotspots

[0587] T Cell Preparation

[0588] Healthy human donor apheresis was obtained commercially (Hemacare), and cells were washed and re-suspended in CliniMACS® PBS/EDTA buffer (Miltenyi Biotec Cat. No. 130-070-525) on the LOVO device. T cells were isolated via positive selection using CD4 and CD8 magnetic beads (Miltenyi Biotec Cat. No. 130-030-401/130-030-801) using the CliniMACS® Plus and CliniMACS® LS disposable kit. T cells were aliquoted into vials and cryopreserved in a 1:1 formulation of Cryostor® CS10 (StemCell Technologies Cat. No. 07930) and Plasmalyte A (Baxter Cat. No. 2B2522X) for future use. Upon thaw, T cells were plated at a density of 1.0×10\hat{ }6 cells/mL in T cell basal media composed of X-VIVO 15™ serum-free hematopoietic cell medium (Lonza Bioscience) containing 5% (v/v) of fetal bovine serum, 50 μM of 2-Mercaptoethanol, 10 mM of N-Acetyl-L-(+)-cysteine, 10 U/mL of Penicillin-Streptomycin, in addition to 1× cytokines (200 U/mL of recombinant human interleukin-2, 5 μg/mL of recombinant human interleukin-7 and 5 μg/mL of recombinant human interleukin-15). T-cells were activated with TransAct™ (1:100 dilution, Miltenyi Biotec). Cells were expanded in T cell basal media containing TransAct™ for 72 hours prior to electroporation.

[0589] mRNA and sgRNA Electroporation of T Cells

[0590] A solution containing mRNA encoding Cas9 (SEQ ID NO: 11), BC22n (SEQ ID NO: 2) or UGI (SEQ ID NO: 26) was prepared in sterile water. A 50 μM TRAC targeting sgRNA (G016017) was removed from its storage plate and denatured for 2 minutes at 95° C. before cooling on ice. Seventy-two hours post activation, T cells were harvested, centrifuged, and resuspended at a concentration of 12.5×10\hat{ }6 T cells/mL in P3 electroporation buffer (Lonza). For each well to be electroporated, 1×10\hat{ }5 T cells were mixed with 200 ng of each mRNA and 20 pmols of sgRNA in a final volume of 20 μL of P3 electroporation buffer. The T cell mix was transferred in triplicate to a 96-well Nucleofector™ plate and electroporated using the manufacturer's pulse code. Electroporated T cells were immediately rested in 80 μL of T cell basal media without cytokines for 10 minutes before being transferred to a new flat-bottom 96-well plate containing an additional 100 μL of T cell basal media supplemented with 2× cytokines. The resulting plate was incubated at 37° C. for 4 days. After 96 hours, T cells were diluted 1:3 into fresh T cell basal media with 1× cytokines. Electroporated T cells were subsequently cultured for 3 additional days and were collected for NGS sequencing.

[0591] NGS Sequencing

[0592] On day 7 post-editing, DNA samples were subjected to PCR and subsequent NGS analysis, as described in Example 1. This study characterized the on-target TRAC locus in addition to 10 genomic loci previously described as mutational hotspots in tumor samples positive for APOBEC enzymes (Buisson et al., 2019). The chromosomal location of these sites is listed on Table 22.

[0593] Tables 23, 24, and 25 show C-to-T, C-to-A/G and indel editing levels in the on-target locus and predicted APOBEC hotspot sites for all sample groups. A graphical representation of these results in shown in FIGS. 16A-16C. Compared to control samples treated with Cas9 mRNA, T cells electroporated with BC22n mRNA, UGI mRNA or BC22n mRNA in addition to both UGI mRNA and the sgRNA G016017 did not display any significant changes in the editing profile of 10 genomic loci previously reported as mutational hotspots in tumor samples positive for APOBEC enzymes (Buisson R., et al. (2019). Science 364, 1-8). High levels of deamination at the on-target TRAC locus were observed in samples treated with BC22n mRNA, UGI mRNA and sgRNA G016017, but absent in those treated with BC22n mRNA alone, Cas9 mRNA alone or UGI mRNA alone.

TABLE 22
List of mutational hotspots evaluated in this study, their
Entrez gene IDs and genomic locations.

| | Entrez | | Genomic | |
|---|---|---|---|---|
| Gene symbol | gene ID | Chromosome | location | Strand |
| FAM83G | 644815 | 17 | 18,907,093 | − |
| PCNT | 5116 | 21 | 47,783,764 | − |
| CUEDC2 | 79004 | 10 | 104,184,490 | − |
| PANX2 | 56666 | 22 | 50,615,649 | − |
| GSE1 | 23199 | 16 | 85,691,140 | − |
| ZNF672 | 79894 | 1 | 249,142,293 | + |
| NLRP1 | 22861 | 17 | 5,461,801 | + |
| MLLT4/AFDN | 4301 | 6 | 168,352,586 | + |
| OR5A1 | 219982 | 11 | 59,211,279 | + |
| KIAA1522 | 57648 | 1 | 33,237,497 | + |

TABLE 23
Levels of C-to-T base conversion in the on-target TRAC locus in
addition to 10 previously described APOBEC hotspots in the human genome.

| | C-to-T Editing | | | | | | | |
|---|---|---|---|---|---|---|---|---|
| | | | | | | | BC22n mRNA + | |
| | | | | | | | UGI mRNA + | |
| | Cas9 mRNA | | BC22n mRNA | | UGI mRNA | | G016017 | |
| Gene | Mean | SD | Mean | SD | Mean | SD | Mean | SD |
| TRAC (on- | 0.14% | 0.02% | 0.13% | 0.01% | 0.19% | 0.02% | 96.26% | 0.25% |
| target) | | | | | | | | |
| FAM83G | 0.23% | 0.05% | 0.22% | 0.03% | 0.22% | 0.04% | 0.28% | 0.05% |
| PCNT | 2.02% | ND | 1.97% | 0.09% | 1.92% | 0.04% | 1.99% | 0.00% |
| CUEDC2 | 0.32% | 0.12% | 0.36% | 0.04% | 0.27% | 0.01% | 0.28% | 0.00% |
| PANX2 | 0.16% | 0.01% | 0.19% | 0.00% | 0.21% | ND | 0.26% | 0.01% |
| GSE1 | 0.20% | 0.03% | 0.11% | ND | 0.15% | ND | 0.12% | 0.02% |
| ZNF672 | 0.15% | 0.02% | 0.19% | 0.03% | 0.20% | 0.01% | 0.18% | 0.02% |
| NLRP1 | 0.14% | 0.00% | 0.15% | 0.01% | 0.15% | 0.00% | 0.16% | 0.02% |
| MLLT4 | 0.12% | 0.01% | 0.13% | 0.03% | 0.13% | 0.01% | 0.14% | 0.00% |
| OR5A1 | 0.12% | 0.03% | 0.13% | 0.01% | 0.13% | 0.02% | 0.14% | 0.04% |
| KIAA1522 | 0.24% | 0.03% | 0.29% | 0.08% | 0.25% | 0.02% | 0.24% | 0.01% |

SD = standard deviation;
ND = not determined.

TABLE 24
Levels of C-to-A/G transversions in the on-target TRAC locus in
addition to 10 previously described APOBEC hotspots in the human genome.

| | C-to-A/G Editing | | | | | | | |
|---|---|---|---|---|---|---|---|---|
| | | | | | | | BC22n mRNA + | |
| | | | | | | | UGI mRNA + | |
| | Cas9 mRNA | | BC22n mRNA | | UGI mRNA | | G016017 | |
| Gene | Mean | SD | Mean | SD | Mean | SD | Mean | SD |
| TRAC (on- | 0.29% | 0.03% | 0.30% | 0.03% | 2.73% | 0.69% | 2.38% | 0.20% |
| target) | | | | | | | | |
| FAM83G | 4.22% | 0.11% | 4.11% | 0.22% | 4.66% | 0.03% | 4.13% | 0.06% |
| PCNT | 0.45% | ND | 0.53% | 0.01% | 0.52% | 0.13% | 0.53% | 0.04% |
| CUEDC2 | 1.28% | 0.01% | 1.34% | 0.11% | 1.27% | 0.20% | 1.36% | 0.01% |
| PANX2 | 2.18% | 0.15% | 2.32% | 0.24% | 2.48% | ND | 2.37% | 0.27% |
| GSE1 | 0.72% | 0.06% | 0.58% | ND | 0.70% | ND | 0.66% | 0.03% |
| ZNF672 | 0.39% | 0.03% | 0.42% | 0.02% | 0.36% | 0.04% | 0.39% | 0.02% |
| NLRP1 | 0.62% | 0.06% | 0.62% | 0.01% | 0.60% | 0.02% | 0.57% | 0.08% |
| MLLT4 | 1.27% | 0.09% | 1.21% | 0.01% | 1.26% | 0.03% | 1.32% | 0.03% |
| OR5A1 | 0.72% | 0.02% | 0.75% | 0.06% | 0.70% | 0.04% | 0.73% | 0.03% |
| KIAA1522 | 0.72% | 0.08% | 0.70% | 0.07% | 0.76% | 0.04% | 0.74% | 0.04% |

SD = standard deviation;
ND = not determined.

TABLE 25
Levels of insertions and deletions (indel) in the on-target TRAC locus
in addition to 10 previously described APOBEC hotspots in the human genome.

| | Indel | | | | | | | |
|---|---|---|---|---|---|---|---|---|
| | | | | | | | BC22n mRNA + | |
| | | | | | | | UGI mRNA + | |
| | Cas9 mRNA | | BC22n mRNA | | UGI mRNA | | G016017 | |
| Gene | Mean | SD | Mean | SD | Mean | SD | Mean | SD |
| TRAC (on- | 0.08% | 0.00% | 0.11% | 0.01% | 0.11% | 0.02% | 0.95% | 0.26% |
| target) | | | | | | | | |
| FAM83G | 3.78% | 0.10% | 3.63% | 0.11% | 3.90% | 0.13% | 3.67% | 0.50% |
| PCNT | 0.11% | ND | 0.23% | 0.00% | 0.18% | 0.02% | 0.21% | 0.02% |
| CUEDC2 | 0.09% | 0.05% | 0.14% | 0.03% | 0.13% | 0.03% | 0.14% | 0.02% |
| PANX2 | 0.47% | 0.01% | 0.54% | 0.10% | 0.26% | ND | 0.52% | 0.02% |
| GSE1 | 0.23% | 0.06% | 0.13% | ND | 0.15% | ND | 0.36% | 0.05% |
| ZNF672 | 0.71% | 0.06% | 0.80% | 0.08% | 0.72% | 0.01% | 0.78% | 0.15% |
| NLRP1 | 0.07% | 0.03% | 0.07% | 0.03% | 0.08% | 0.01% | 0.07% | 0.01% |
| MLLT4 | 0.26% | 0.00% | 0.25% | 0.01% | 0.25% | 0.02% | 0.27% | 0.01% |
| OR5A1 | 0.07% | 0.02% | 0.08% | 0.01% | 0.08% | 0.01% | 0.07% | 0.01% |
| KIAA1522 | 0.38% | 0.01% | 0.46% | 0.02% | 0.42% | 0.02% | 0.41% | 0.00% |

SD = standard deviation;
ND = not determined.

### Example 8—LNP Titration in T Cells with Fixed Ratio of BC22n:UGI

[0594] Using LNP delivery to activated human T cells, the potency of single-target and multi-target editing was assessed with either Cas9 or BC22n.

### 8.1 T Cell Preparation

[0595] Healthy human donor apheresis was obtained commercially (Hemacare), and cells were washed and re-suspended in CliniMACS® PBS/EDTA buffer (Miltenyi Biotec Cat. No. 130-070-525) on the LOVO device. T cells were isolated via positive selection using CD4 and CD8 magnetic beads (Miltenyi Biotec Cat. No. 130-030-401/130-030-801) using the CliniMACS® Plus and CliniMACS® LS disposable kit. T cells were aliquoted into vials and cryopreserved in a 1:1 formulation of Cryostor® CS10 (StemCell Technologies Cat. No. 07930) and Plasmalyte A (Baxter Cat. No. 2B2522X) for future use. Upon thaw, T cells were plated at a density of 1.0×10\hat{ }6 cells/mL in T cell basal media composed of X-VIVO 15™ serum-free hematopoietic cell medium (Lonza Bioscience) containing 5% (v/v) of fetal bovine serum, 50 μM of 2-Mercaptoethanol, 10 mM of N-Acetyl-L-(+)-cysteine, 10 U/mL of Penicillin-Streptomycin, in addition to 1× cytokines (200 U/mL of recombinant human interleukin-2, 5 μg/mL of recombinant human interleukin-7 and 5 μg/mL of recombinant human interleukin-15). T cells were activated with TransAct™ (1:100 dilution, Miltenyi Biotec). Cells were expanded in T cell basal media for 72 hours prior to LNP transfection.

### 8.2 T Cell Editing

[0596] Each RNA species, i.e. UGI mRNA, sgRNA or editor mRNA, was formulated separately in an LNP as described in Example 1. Editor mRNAs encoded either BC22n (SEQ ID NO: 5) or Cas9 (SEQ ID NO: 23). Guides targeting B2M (G015995), TRAC (G016017), TRBC1/2 (G016206) and CIITA (G018117 and G016086) were used either singly or in combination. Messenger RNA encoding UGI (SEQ ID NO: 26) is delivered in both Cas9 and BC22n arms of the experiment to normalize lipid amounts. Previous experiments have established UGI mRNA does not impact total editing or editing profile when used with Cas9 mRNA. LNPs were mixed to fixed total RNA weight ratios of 6:3:2 for editor mRNA, guide RNA, and UGI mRNA respectively as described in Table 26. In the 4-guide experiment described in Table 27, doses of LNPs with individual guides are decreased 4-fold to maintain the overall 6:3 editor mRNA:guide weight ratio and to allow comparison to individual guide potency based on total lipid delivery. LNP mixtures were incubated for 5 minutes at 37° C. in T cell basal media substituting 6% cynomolgus monkey serum (Bioreclamation IVT, Cat. CYN220760) for fetal bovine serum.

[0597] Seventy-two hours post activation, T cells were washed and suspended in basal T cell media. Pre-incubated LNP mix was added to the each well with 1×10e5 T cells/well. T cells were incubated at 37° C. with 5% C02 for the duration of the experiment. T cell media was changed 6 days and 8 days after activation and on tenth day post activation, cells were harvested for analysis by NGS and flow cytometry. NGS analysis was performed as described in Example 1.

[0598] Table 26 and FIGS. 17A-E describe the editing profile of T cells when an individual guide was used for editing. Total editing and C to T editing showed direct, dose responsive relationships to increasing amounts of BC22n mRNA, UGI mRNA and guide across all guides tested. Indel and C conversions to A or G are in an inverse relationship with dose where lower doses resulted in a higher percentage of these mutations. In samples edited with Cas9, total editing and indel activity increase with the total RNA dose.

TABLE 26
Editing as a percent of total reads-single guide delivery

| | | Total | | | % C- | | | | |
|---|---|---|---|---|---|---|---|---|---|
| | | RNA | % C-to-T | | to-A/G | | % Indel | | |
| Guide | Editor | (ng) | mean | SD | mean | SD | mean | SD | N |
| G015995 | BC22n | 0.0 | 0.3 | 0.0 | 1.5 | 0.1 | 0.2 | 0.0 | 2 |
| B2M | | 8.6 | 49.5 | 3.5 | 7.7 | 0.6 | 6.0 | 0.4 | 2 |
| | | 17.2 | 68.5 | 1.7 | 6.7 | 1.3 | 4.3 | 0.1 | 2 |
| | | 34.4 | 79.0 | 0.9 | 5.7 | 0.3 | 3.8 | 0.0 | 2 |
| | | 68.8 | 88.2 | 0.8 | 4.6 | 0.0 | 2.5 | 0.2 | 2 |
| | | 137.5 | 90.6 | 1.8 | 4.1 | 0.4 | 2.2 | 0.5 | 2 |
| | | 275.0 | 92.6 | 0.8 | 3.7 | 0.3 | 2.2 | 0.3 | 2 |
| | | 550.0 | 95.2 | 0.4 | 2.8 | 0.0 | 1.6 | 0.2 | 2 |
| | Cas9 | 0.0 | 0.3 | 0.0 | 1.5 | 0.2 | 0.2 | 0.0 | 2 |
| | | 8.6 | 0.3 | 0.0 | 1.2 | 0.1 | 23.7 | 2.1 | 2 |
| | | 17.2 | 0.3 | 0.0 | 0.9 | 0.1 | 41.1 | 0.2 | 2 |
| | | 34.4 | 0.3 | 0.0 | 0.6 | 0.0 | 59.4 | 0.6 | 2 |
| | | 68.8 | 0.2 | 0.1 | 0.4 | 0.0 | 76.8 | 1.2 | 2 |
| | | 137.5 | 0.1 | 0.1 | 0.2 | 0.0 | 88.2 | 2.0 | 2 |
| | | 275.0 | 0.1 | 0.0 | 0.1 | 0.1 | 95.1 | 0.5 | 2 |
| | | 550.0 | 0.1 | 0.0 | 0.1 | 0.0 | 97.5 | 0.3 | 2 |
| G016017 | BC22n | 0.0 | 0.2 | 0.0 | 2.2 | 0.1 | 0.2 | 0.1 | 2 |
| TRAC | | 8.6 | 34.6 | 1.1 | 5.6 | 0.8 | 6.6 | 0.2 | 2 |
| | | 17.2 | 51.3 | 0.8 | 5.7 | 0.1 | 6.7 | 1.0 | 2 |
| | | 34.4 | 66.9 | 2.6 | 5.4 | 0.2 | 4.7 | 0.4 | 2 |
| | | 68.8 | 79.0 | 0.6 | 4.4 | 0.7 | 4.5 | 0.9 | 2 |
| | | 137.5 | 89.2 | 0.4 | 3.6 | 0.9 | 2.5 | 0.2 | 2 |
| | | 275.0 | 92.8 | 0.9 | 2.9 | 0.0 | 2.3 | 0.0 | 2 |
| | | 550.0 | 94.5 | 1.3 | 3.4 | 1.0 | 1.6 | 0.2 | 2 |
| | Cas9 | 0.0 | 0.2 | 0.0 | 2.3 | 0.1 | 0.1 | 0.0 | 2 |
| | | 8.6 | 0.2 | 0.0 | 2.1 | 0.2 | 20.7 | 0.5 | 2 |
| | | 17.2 | 0.1 | 0.0 | 1.4 | 0.0 | 34.6 | 0.7 | 2 |
| | | 34.4 | 0.1 | 0.0 | 1.5 | 0.4 | 49.8 | 0.4 | 2 |
| | | 68.8 | 0.1 | 0.0 | 1.0 | 0.0 | 62.3 | 0.1 | 2 |
| | | 137.5 | 0.1 | 0.0 | 0.6 | 0.1 | 77.0 | 0.1 | 2 |
| | | 275.0 | 0.0 | 0.0 | 0.3 | 0.0 | 87.8 | 0.2 | 2 |
| | | 550.0 | 0.0 | 0.0 | 0.2 | 0.0 | 93.8 | 0.6 | 2 |
| G016206 | BC22n | 0.0 | 0.4 | 0.1 | 0.6 | 0.1 | 0.1 | 0.1 | 2 |
| TRBC1/2 | | 8.6 | 23.7 | 1.3 | 6.1 | 0.0 | 6.1 | 0.8 | 2 |
| | | 17.2 | 42.4 | 2.2 | 6.8 | 0.1 | 6.8 | 0.3 | 2 |
| | | 34.4 | 60.1 | 2.2 | 5.7 | 0.3 | 5.9 | 0.7 | 2 |
| | | 68.8 | 73.2 | 4.2 | 4.3 | 0.1 | 4.7 | 1.1 | 2 |
| | | 137.5 | 81.7 | 0.8 | 3.6 | 0.2 | 3.7 | 0.4 | 2 |
| | | 275.0 | 91.0 | 1.7 | 2.3 | 0.1 | 2.8 | 0.8 | 2 |
| | | 550.0 | 93.6 | 1.9 | 2.0 | 0.2 | 1.7 | 0.6 | 2 |
| | Cas9 | 0.0 | 0.3 | 0.0 | 0.5 | 0.0 | 0.1 | 0.0 | 1 |
| | | 8.6 | 0.3 | 0.2 | 0.5 | 0.1 | 8.1 | 0.2 | 2 |
| | | 17.2 | 0.3 | 0.1 | 0.7 | 0.1 | 14.9 | 0.6 | 2 |
| | | 34.4 | 0.2 | 0.0 | 0.8 | 0.0 | 24.1 | 0.0 | 1 |
| | | 68.8 | 0.2 | 0.0 | 0.4 | 0.0 | 35.9 | 0.0 | 1 |
| | | 137.5 | 0.2 | 0.0 | 0.5 | 0.0 | 48.6 | 2.1 | 2 |
| | | 275.0 | 0.1 | 0.0 | 0.4 | 0.0 | 63.8 | 0.0 | 1 |
| | | 550.0 | Not assayed | | | | | | |
| G018117 | BC22n | 0.0 | 0.3 | 0.0 | 2.7 | 0.1 | 0.3 | 0.0 | 2 |
| CIITA | | 8.6 | 14.5 | 1.5 | 3.8 | 0.3 | 3.5 | 0.3 | 2 |
| | | 17.2 | 28.1 | 0.6 | 3.5 | 0.3 | 3.9 | 1.0 | 2 |
| | | 34.4 | 45.9 | 0.4 | 3.3 | 0.4 | 3.6 | 0.0 | 2 |
| | | 68.8 | 62.8 | 5.3 | 3.6 | 0.1 | 3.7 | 1.2 | 2 |
| | | 137.5 | 78.9 | 1.3 | 2.7 | 0.1 | 2.7 | 0.7 | 2 |
| | | 275.0 | 86.3 | 1.8 | 2.6 | 0.1 | 2.0 | 0.1 | 2 |
| | | 550.0 | 92.3 | 1.2 | 2.6 | 0.2 | 1.1 | 0.2 | 2 |
| | Cas9 | 0.0 | 0.2 | 0.0 | 2.8 | 0.1 | 0.3 | 0.0 | 2 |
| | | 8.6 | 0.3 | 0.0 | 2.5 | 0.0 | 6.0 | 0.2 | 2 |
| | | 17.2 | 0.2 | 0.0 | 2.4 | 0.1 | 11.2 | 1.6 | 2 |
| | | 34.4 | 0.2 | 0.0 | 2.1 | 0.0 | 20.8 | 0.3 | 2 |
| | | 68.8 | 0.2 | 0.0 | 1.9 | 0.1 | 33.2 | 0.4 | 2 |
| | | 137.5 | 0.1 | 0.0 | 1.3 | 0.1 | 51.2 | 0.0 | 2 |
| | | 275.0 | 0.1 | 0.0 | 0.9 | 0.2 | 64.5 | 0.9 | 2 |
| | | 550.0 | 0.1 | 0.0 | 0.6 | 0.0 | 78.4 | 1.1 | 2 |
| G016086 | BC22n | 0.0 | 0.2 | 0.0 | 1.0 | 0.1 | 0.1 | 0.0 | 2 |
| CIITA | | 8.6 | 23.5 | 1.8 | 3.2 | 0.1 | 3.7 | 0.1 | 2 |
| | | 17.2 | 40.9 | 1.1 | 4.4 | 0.7 | 4.6 | 1.0 | 2 |
| | | 34.4 | 58.0 | 0.5 | 4.6 | 0.3 | 3.8 | 0.6 | 2 |
| | | 68.8 | 73.5 | 0.7 | 3.7 | 0.0 | 2.8 | 0.5 | 2 |
| | | 137.5 | 83.8 | 1.1 | 3.7 | 0.5 | 2.0 | 0.7 | 2 |
| | | 275.0 | 90.1 | 2.4 | 3.1 | 0.1 | 1.9 | 0.8 | 2 |
| | | 550.0 | 93.4 | 0.9 | 3.0 | 0.2 | 1.2 | 0.3 | 2 |
| | Cas9 | 0.0 | 0.2 | 0.0 | 1.0 | 0.1 | 0.1 | 0.0 | 2 |
| | | 8.6 | 0.2 | 0.0 | 1.1 | 0.2 | 7.4 | 0.7 | 2 |
| | | 17.2 | 0.2 | 0.0 | 1.1 | 0.3 | 17.7 | 1.0 | 2 |
| | | 34.4 | 0.2 | 0.0 | 0.8 | 0.1 | 32.1 | 0.1 | 2 |
| | | 68.8 | 0.2 | 0.0 | 0.7 | 0.2 | 51.5 | 0.8 | 2 |
| | | 137.5 | 0.2 | 0.0 | 0.4 | 0.0 | 69.3 | 0.1 | 2 |
| | | 275.0 | 0.3 | 0.1 | 0.3 | 0.1 | 84.2 | 0.1 | 2 |
| | | 550.0 | 0.3 | 0.0 | 0.1 | 0.1 | 90.0 | 0.7 | 2 |

[0599] Table 27 and FIGS. 18A-18D describe the editing profile for T cells in percent of total reads when four guides were used simultaneously for editing. In this arm of the experiment, each guide is used at 25% the concentration compared to the single guide editing experiment. In total, T cells were exposed to 6 different LNPs simultaneously (editor mRNA, UGI mRNA, 4 guides). Editing with BC22n and trans UGI lead to higher percentages of maximum total editing for each locus compared to editing with Cas9.

TABLE 27
Editing as a percentage of total reads-multiple guide
delivery

| | | Total | % | | % | | % | | |
|---|---|---|---|---|---|---|---|---|---|
| Locus | | RNA | C-to-T | | C-to-A/G | | Indel | | |
| Assayed | Editor | (ng) | mean | SD | mean | SD | Mean | SD | N |
| G015995 | BC22n | 0.0 | 0.3 | 0.0 | 1.5 | 0.2 | 0.2 | 0.0 | 2 |
| B2M | | 8.6 | 27.3 | 0.2 | 3.8 | 0.1 | 2.6 | 0.1 | 2 |
| | | 17.2 | 47.2 | 2.2 | 4.1 | 0.4 | 3.0 | 0.1 | 2 |
| | | 34.4 | 61.2 | 3.0 | 3.9 | 0.1 | 2.6 | 0.3 | 2 |
| | | 68.8 | 81.4 | 0.1 | 2.9 | 0.1 | 1.4 | 0.1 | 2 |
| | | 137.5 | 90.0 | 1.1 | 2.6 | 0.3 | 1.3 | 0.5 | 2 |
| | | 275.0 | 94.7 | 0.1 | 2.2 | 0.1 | 0.8 | 0.0 | 2 |
| | | 550.0 | 95.9 | 0.9 | 2.9 | 1.0 | 0.4 | 0.3 | 2 |
| | Cas9 | 0.0 | 0.3 | 0.0 | 1.4 | 0.1 | 0.2 | 0.0 | 2 |
| | | 8.6 | 0.3 | 0.0 | 1.4 | 0.0 | 5.0 | 0.1 | 2 |
| | | 17.2 | 0.3 | 0.0 | 1.3 | 0.0 | 10.5 | 0.4 | 2 |
| | | 34.4 | 0.3 | 0.0 | 1.1 | 0.0 | 19.3 | 0.6 | 2 |
| | | 68.8 | 0.3 | 0.0 | 0.9 | 0.0 | 34.4 | 0.1 | 2 |
| | | 137.5 | 0.2 | 0.0 | 0.7 | 0.0 | 51.1 | 1.3 | 2 |
| | | 275.0 | 0.2 | 0.1 | 0.5 | 0.0 | 68.0 | 0.1 | 2 |
| | | 550.0 | 0.3 | 0.1 | 0.4 | 0.1 | 76.7 | 2.0 | 2 |
| G016017 | BC22n | 0.0 | 0.1 | 0.1 | 1.9 | 0.6 | 0.2 | 0.0 | 2 |
| TRAC | | 8.6 | 12.1 | 1.3 | 4.3 | 0.2 | 2.4 | 0.2 | 2 |
| | | 17.2 | 25.7 | 2.2 | 4.2 | 0.5 | 3.8 | 0.7 | 2 |
| | | 34.4 | 44.7 | 1.4 | 4.7 | 1.0 | 3.0 | 0.3 | 2 |
| | | 68.8 | 64.2 | 1.9 | 4.4 | 0.6 | 2.5 | 0.1 | 2 |
| | | 137.5 | 79.3 | 1.1 | 3.6 | 0.4 | 2.1 | 0.1 | 2 |
| | | 275.0 | 90.7 | 0.0 | 3.0 | 0.1 | 1.5 | 0.0 | 2 |
| | | 550.0 | 93.3 | 0.6 | 2.4 | 0.1 | 0.9 | 0.4 | 2 |
| | Cas9 | 0.0 | 0.1 | 0.1 | 2.1 | 0.2 | 0.1 | 0.0 | 2 |
| | | 8.6 | 0.2 | 0.1 | 2.3 | 0.2 | 6.1 | 0.2 | 2 |
| | | 17.2 | 0.1 | 0.0 | 1.8 | 0.2 | 11.5 | 0.5 | 2 |
| | | 34.4 | 0.1 | 0.0 | 2.0 | 0.4 | 21.0 | 0.4 | 2 |
| | | 68.8 | 0.1 | 0.0 | 1.4 | 0.0 | 33.5 | 0.1 | 2 |
| | | 137.5 | 0.1 | 0.0 | 1.2 | 0.1 | 47.5 | 0.5 | 2 |
| | | 275.0 | 0.1 | 0.0 | 0.9 | 0.1 | 64.8 | 0.2 | 2 |
| | | 550.0 | 0.1 | 0.0 | 0.6 | 0.1 | 76.1 | 1.3 | 2 |
| G016206 | BC22n | 0.0 | No data | | | | | | |
| TRBC1/2 | | 8.6 | 11.6 | 0.3 | 2.6 | 0.2 | 2.8 | 0.3 | 2 |
| | | 17.2 | 23.4 | 0.4 | 3.6 | 0.3 | 2.6 | 0.5 | 2 |
| | | 34.4 | 38.5 | 1.4 | 3.7 | 0.2 | 2.9 | 0.7 | 2 |
| | | 68.8 | 55.6 | 1.7 | 2.3 | 0.4 | 2.4 | 0.0 | 2 |
| | | 137.5 | 72.4 | 1.2 | 1.8 | 0.5 | 1.7 | 0.5 | 2 |
| | | 275.0 | 85.1 | 1.0 | 1.9 | 0.5 | 1.7 | 0.6 | 2 |
| | | 550.0 | 89.8 | 2.8 | 2.2 | 0.1 | 0.9 | 0.3 | 2 |
| | Cas9 | 0.0 | 0.2 | 0.0 | 0.6 | 0.0 | 0.1 | 0.0 | 1 |
| | | 8.6 | 0.2 | 0.1 | 0.7 | 0.1 | 2.3 | 0.3 | 2 |
| | | 17.2 | 0.3 | 0.0 | 0.7 | 0.3 | 4.2 | 0.4 | 2 |
| | | 34.4 | 0.1 | 0.0 | 0.5 | 0.1 | 6.6 | 0.5 | 2 |
| | | 68.8 | 0.4 | 0.0 | 0.5 | 0.0 | 12.3 | 0.0 | 1 |
| | | 137.5 | 0.2 | 0.0 | 0.5 | 0.0 | 17.8 | 0.0 | 1 |
| | | 275.0 | 0.1 | 0.0 | 0.5 | 0.0 | 33.0 | 0.0 | 1 |
| | | 550.0 | 0.3 | 0.2 | 0.3 | 0.0 | 43.3 | 1.7 | 2 |
| G018117 | BC22n | 0.0 | 0.2 | 0.0 | 2.6 | 0.1 | 0.3 | 0.0 | 2 |
| CIITA | | 8.6 | 4.6 | 0.9 | 3.1 | 0.2 | 0.8 | 0.2 | 2 |
| | | 17.2 | 10.5 | 0.2 | 2.9 | 0.1 | 1.1 | 0.2 | 2 |
| | | 34.4 | 18.8 | 0.3 | 2.9 | 0.2 | 1.6 | 0.2 | 2 |
| | | 68.8 | 35.1 | 0.6 | 2.7 | 0.2 | 1.6 | 0.7 | 2 |
| | | 137.5 | 52.9 | 0.2 | 2.9 | 0.3 | 1.5 | 0.0 | 2 |
| | | 275.0 | 71.9 | 2.4 | 2.5 | 0.3 | 1.3 | 0.1 | 2 |
| | | 550.0 | 81.1 | 1.9 | 2.6 | 0.1 | 1.1 | 0.6 | 2 |
| | Cas9 | 0.0 | 0.3 | 0.0 | 2.7 | 0.1 | 0.3 | 0.0 | 2 |
| | | 8.6 | 0.2 | 0.0 | 2.6 | 0.2 | 1.4 | 0.0 | 2 |
| | | 17.2 | 0.2 | 0.0 | 2.5 | 0.0 | 2.1 | 0.3 | 2 |
| | | 34.4 | 0.3 | 0.0 | 2.5 | 0.0 | 3.9 | 0.1 | 2 |
| | | 68.8 | 0.2 | 0.0 | 2.5 | 0.2 | 7.7 | 0.6 | 2 |
| | | 137.5 | 0.2 | 0.0 | 2.2 | 0.1 | 13.3 | 0.2 | 2 |
| | | 275.0 | 0.1 | 0.0 | 1.9 | 0.0 | 26.7 | 1.3 | 2 |
| | | 550.0 | 0.1 | 0.0 | 1.7 | 0.1 | 42.3 | 0.3 | 2 |

[0600] On day 10 post-activation, T cells were phenotyped by flow cytometry to determine if editing resulted in loss of cell surface proteins. Briefly, T cells were incubated in a mix of the following antibodies: B2M-FITC (BioLegend, Cat. 316304), CD3-AF700 (BioLegend, Cat. 317322), HLA DR DQ DP-PE (BioLegend, Cat 361704) and DAPI (BioLegend, Cat 422801). A subset of unedited cells was incubated with Isotype Control-PE (BioLegend® Cat. No. 400234). Cells were subsequently washed, processed on a Cytoflex instrument (Beckman Coulter), and analyzed using the FlowJo software package. T cells were gated based on size, shape, viability, and antigen expression.

[0601] Table 28 and FIGS. 19A-19I report phenotyping results as percent of cells negative for antibody binding. The percentage of antigen negative cells increased in a dose responsive manner with increasing total RNA for both BC22n and Cas9 samples. Cells edited with BC22n showed comparable or higher protein knockout compared to cells edited with Cas9 for all guides tested. In multi-edited cells, BC22n with trans UGI showed substantially higher percentages of antigen negative cells than Cas9 with trans UGI. For example, BC22n edited samples at the highest total RNA dose of 550 ng showed 84.2% of cells lacking all three antigens, while Cas9 editing led to only 46.8% such triple knockout cells. For samples treated with one guide only, the correlation between DNA editing and antigen reduction was robust. BC22n had an R square measurement of 0.93 when comparing C to T conversions to antigen knockout. Cas9 had an R square measurement of 0.95 when comparing indels to antigen knockout.

TABLE 28
Flow cytometry data-percent cells negative for antigen
(n = 2)

| | | Total | BC22n | | Cas9 | |
|---|---|---|---|---|---|---|
| | | RNA | Mean | | Mean | |
| Guide(s) | Phenotype | (ng) | % | SD | % | SD |
| G015995 | B2M neg | 550.0 | 95.7 | 0.1 | 91.3 | 0.6 |
| B2M | | 275.0 | 94.4 | 0.4 | 89.3 | 0.1 |
| | | 137.5 | 91.2 | 0.1 | 82.1 | 3.3 |
| | | 68.8 | 83.9 | 0.4 | 68.7 | 3.3 |
| | | 34.4 | 75.7 | 1.4 | 53.4 | 0.2 |
| | | 17.2 | 60.8 | 2.0 | 30.7 | 1.3 |
| | | 8.6 | 44.0 | 2.3 | 13.9 | 2.0 |
| | | 0.0 | 14.1 | 4.1 | 9.9 | 1.9 |
| G015995 | B2M neg | 550.0 | 94.4 | 0.1 | 74.2 | 0.4 |
| G016017 | | 275.0 | 91.3 | 0.1 | 65.2 | 0.1 |
| G016206 | | 137.5 | 84.3 | 0.2 | 45.4 | 1.9 |
| G018117 | | 68.8 | 72.7 | 0.4 | 24.5 | 0.8 |
| | | 34.4 | 56.2 | 1.2 | 14.1 | 2.3 |
| | | 17.2 | 38.5 | 0.2 | 9.9 | 0.8 |
| | | 8.6 | 20.6 | 0.7 | 7.6 | 2.4 |
| | | 0.0 | 14.1 | 4.1 | 9.9 | 1.9 |
| G016017 | CD3 neg | 550.0 | 97.3 | 0.3 | 94.8 | 0.4 |
| TRAC | | 275.0 | 96.0 | 0.2 | 87.0 | 4.9 |
| | | 137.5 | 91.9 | 0.2 | 72.7 | 0.9 |
| | | 68.8 | 85.7 | 0.5 | 65.6 | 0.1 |
| | | 34.4 | 76.6 | 0.8 | 51.7 | 3.0 |
| | | 17.2 | 61.8 | 1.7 | 35.7 | 1.1 |
| | | 8.6 | 42.1 | 0.7 | 20.1 | 1.5 |
| | | 0.0 | 1.0 | 0.1 | 0.9 | 0.1 |
| G016206 | CD3 neg | 550.0 | 97.9 | 0.1 | 86.6 | 0.3 |
| TRBC1/2 | | 275.0 | 96.0 | 0.1 | 77.3 | 0.1 |
| | | 137.5 | 90.4 | 0.8 | 59.4 | 0.4 |
| | | 68.8 | 82.9 | 0.1 | 40.6 | 1.2 |
| | | 34.4 | 71.9 | 1.5 | 27.0 | 1.6 |
| | | 17.2 | 53.4 | 0.3 | 16.1 | 0.1 |
| | | 8.6 | 32.6 | 0.6 | 7.9 | 0.4 |
| | | 0.0 | 0.8 | 0.0 | 0.9 | 0.4 |
| G015995 | CD3 neg | 550.0 | 98.3 | 0.2 | 84.2 | 0.1 |
| G016017 | | 275.0 | 96.3 | 0.1 | 74.6 | 0.5 |
| G016206 | | 137.5 | 90.4 | 0.3 | 57.4 | 1.0 |
| G018117 | | 68.8 | 81.3 | 0.3 | 39.4 | 0.1 |
| | | 34.4 | 66.3 | 1.6 | 25.6 | 0.8 |
| | | 17.2 | 48.2 | 1.0 | 15.3 | 0.5 |
| | | 8.6 | 27.3 | 0.7 | 8.6 | 0.5 |
| | | 0.0 | 0.9 | 0.1 | 0.9 | 0.2 |
| G018117 | MHC II | 550.0 | 95.7 | 0.4 | 72.0 | 0.1 |
| CIITA | neg | 275.0 | 92.5 | 1.1 | 65.6 | 0.4 |
| | | 137.5 | 85.2 | 0.6 | 55.5 | 0.6 |
| | | 68.8 | 74.5 | 1.1 | 48.9 | 0.0 |
| | | 34.4 | 65.8 | 3.7 | 40.7 | 0.6 |
| | | 17.2 | 49.9 | 0.1 | 36.2 | 0.6 |
| | | 8.6 | 41.6 | 0.8 | 34.2 | 1.3 |
| | | 0.0 | 30.1 | 1.6 | 35.2 | 0.4 |
| G015995 | MHC II | 550.0 | 88.0 | 0.2 | 52.8 | 1.1 |
| G016017 | neg | 275.0 | 81.2 | 0.2 | 46.4 | 0.4 |
| G016206 | | 137.5 | 70.4 | 1.3 | 39.9 | 1.8 |
| G018117 | | 68.8 | 60.0 | 0.4 | 39.1 | 3.3 |
| | | 34.4 | 48.8 | 0.6 | 37.7 | 2.9 |
| | | 17.2 | 43.0 | 4.2 | 37.5 | 0.6 |
| | | 8.6 | 37.8 | 2.1 | 35.0 | 0.0 |
| | | 0.0 | 33.0 | 1.9 | 37.3 | 2.1 |
| G015995 | B2M neg | 550.0 | 84.2 | 0.0 | 46.8 | 1.1 |
| G016017 | CD3 neg | 275.0 | 76.2 | 0.0 | 37.8 | 0.2 |
| G016206 | MHC II | 137.5 | 63.0 | 1.3 | 23.4 | 2.4 |
| G018117 | neg | 68.8 | 48.2 | 0.2 | 10.8 | 0.9 |
| | | 34.4 | 31.5 | 1.1 | 3.6 | 0.9 |
| | | 17.2 | 17.8 | 1.7 | 1.1 | 0.2 |
| | | 8.6 | 6.4 | 0.0 | 0.4 | 0.1 |
| | | 0.0 | 0.1 | 0.0 | 0.1 | 0.0 |
| G016086 | HLA DR | 550.0 | 96.0 | 0.1 | 90.9 | 0.7 |
| CIITA | DP DQ | 275.0 | 93.7 | 0.1 | 87.4 | 0.3 |
| | neg | 137.5 | 88.4 | 0.5 | 76.3 | 0.6 |
| | | 68.8 | 80.0 | 0.7 | 66.1 | 1.8 |
| | | 34.4 | 69.2 | 1.5 | 53.4 | 1.1 |
| | | 17.2 | 56.4 | 0.4 | 41.9 | 0.8 |
| | | 8.6 | 45.2 | 2.9 | 37.3 | 0.1 |
| | | 0.0 | 30.1 | 0.9 | 36.8 | 0.4 |

### Example 9—Editing in T Cells with Trans UGI Titration

[0602] Editing profiles were assessed to determine the concentration of UGI mRNA necessary to achieve highly pure C-to-T editing in T cells with different editing constructs. C-to-T editing purity (% of edited reads containing only C-to-T conversions) was measured using a saturating dose of editor mRNA and sgRNA and varying amounts of UGI mRNA. Editor mRNAs included an mRNA encoding BC22n (SEQ ID NO: 5), an mRNA encoding BC22 with a total of 2 fused UGI moieties (SEQ ID NO: 29), and an mRNA encoding BE4Max which includes 2 fused UGI moieties (SEQ ID NO: 32) (Koblan L W, Doman J L, Wilson C, et al. Nat Biotechnol. 2018; 36(9):843-846).

[0603] Solutions containing editor mRNA as listed in Table 29 or UGI mRNA (SEQ ID NO: 26) were prepared in sterile water. 50 μM B2M targeting sgRNA G015995 were removed from their storage plates and denatured for 2 minutes at 95° C. before cooling on ice. Seventy-two hours post activation, T cells were harvested, centrifuged, and resuspended at a concentration of 12.5×10\hat{ }6 T cells/mL in P3 electroporation buffer (Lonza). For each well to be electroporated, 1×10\hat{ }5 T cells were mixed with 200 ng of editor mRNAs, 20 pmols of sgRNA and different concentrations of UGI mRNA ranging from 0.8 ng to 600.0 ng (0.8 nM to 597.0 nM), in a final volume of 20 uL of P3 electroporation buffer. This mRNA+sgRNA+T cell mix was transferred in triplicate to a 96-well Nucleofector™ plate and electroporated using the manufacturer's pulse code. Electroporated T cells were immediately rested in CTS™ OpTmizer™ T Cell Expansion serum-free media (SFM) (ThermoFisher Cat. A1048501) without cytokines for 10 minutes before being transferred to a new flat-bottom 96-well plate containing an additional 100 uL of the same media with 2× concentration of cytokines. The resulting plate was incubated at 37° C. for 9 days, during which time the cells were split and media refreshed two times. T cells were collected and processed for NGS sequencing as described in Example 1.

[0604] Table 29 and FIGS. 20A-20C show the percentage of reads with each edit type. Increasing levels of UGI mRNA in trans decreased indels for all three editor constructs. With 199 nM UGI mRNA or higher, indels were decreased to less than 2% of total reads for each editor construct tested. At low concentrations of UGI mRNA in trans, editor constructs that encoded UGI showed more C to T conversions than the BC22n construct that lacked an encoded UGI. Table 30 and FIG. 21 represents the data captured in Table 29 and FIGS. 20A-20C as percentage of total edits that were C to T conversions, also known as the C to T purity. Increasing UGI mRNA in trans increased C to T total editing and increased C to T purity for all constructs. All three constructs showed over 95% C to T editing purity with 199 nM UGI mRNA, which corresponds to a molar ratio of UGI mRNA to editor mRNA of about 7:1.

TABLE 29
Editing type as a percentage of total reads with increasing
UGI mRNA

| | nM UGI | % C-to-T | | % C-to-A/G | | % Indel | |
|---|---|---|---|---|---|---|---|
| Editor | mRNA | mean | SD | mean | SD | mean | SD |
| BC22n | No UGI | 19.9 | 1.1 | 31.8 | 1.4 | 47.4 | 0.4 |
| | 0.82 | 23.2 | 0.6 | 29.7 | 1.6 | 45.9 | 2.8 |
| | 2.46 | 32.0 | 0.2 | 24.5 | 2.3 | 42.6 | 3.3 |
| | 7.37 | 45.0 | 1.1 | 23.6 | 1.6 | 30.4 | 2.1 |
| | 22.11 | 59.8 | 1.0 | 18.1 | 0.1 | 20.6 | 0.4 |
| | 66.33 | 82.7 | 2.6 | 9.3 | 1.7 | 7.2 | 1.2 |
| | 199 | 93.8 | 1.4 | 3.2 | 0.4 | 1.5 | 0.3 |
| | 597 | 95.7 | 0.1 | 1.9 | 0.2 | 1.3 | 0.4 |
| BC22- | No UGI | 54.2 | 0.4 | 19.2 | 2.3 | 21.0 | 2.1 |
| 2xUGI | 0.82 | 58.6 | 0.1 | 18.1 | 1.9 | 21.0 | 2.3 |
| | 2.46 | 61.7 | 2.0 | 18.0 | 2.9 | 17.5 | 1.8 |
| | 7.37 | 68.5 | 0.1 | 14.5 | 1.1 | 15.1 | 0.8 |
| | 22.11 | 75.7 | 1.1 | 12.1 | 2.3 | 10.1 | 2.1 |
| | 66.33 | 88.4 | 1.2 | 5.4 | 0.6 | 4.7 | 1.1 |
| | 199 | 94.6 | 0.1 | 2.1 | 0.1 | 1.5 | 0.1 |
| | 597 | 96.9 | 0.6 | 1.4 | 0.1 | 0.6 | 0.1 |
| BE4Max | No UGI | 54.7 | 1.3 | 17.2 | 0.3 | 9.1 | 0.1 |
| | 0.82 | 60.3 | 0.5 | 15.8 | 0.5 | 7.3 | 0.7 |
| | 2.46 | 62.4 | 0.1 | 16.2 | 0.2 | 6.7 | 0.6 |
| | 7.37 | 65.2 | 0.6 | 15.1 | 2.0 | 5.8 | 0.4 |
| | 22.11 | 71.8 | 0.4 | 10.0 | 0.2 | 4.2 | 0.6 |
| | 66.33 | 78.6 | 0.6 | 4.9 | 1.1 | 2.1 | 0.4 |
| | 199 | 83.8 | 1.0 | 2.3 | 0.8 | 0.5 | 0.1 |
| | 597 | 85.9 | 1.6 | 1.2 | 0.1 | 0.4 | 0.1 |

TABLE 30
C-to-T purity: Percent of edited sequencing reads containing only
C-to-T conversions, no indels, no C to A/G conversions (n = 2)

| nM UGI | BC22n | | BC22-2XUGI | | BE4Max | |
|---|---|---|---|---|---|---|
| mRNA | mean | SD | mean | SD | mean | SD |
| 597 | 96.8 | 0.7 | 98.0 | 0.1 | 98.2 | 0.1 |
| 199 | 95.3 | 0.7 | 96.4 | 0.1 | 96.8 | 1.1 |
| 66.33 | 83.4 | 2.9 | 89.8 | 1.6 | 91.9 | 0.9 |
| 22.11 | 60.8 | 0.6 | 77.4 | 0.4 | 83.6 | 0.8 |
| 7.37 | 45.4 | 0.8 | 69.9 | 0.2 | 75.8 | 1.6 |
| 2.46 | 32.3 | 0.5 | 63.5 | 1.4 | 73.2 | 0.7 |
| 0.82 | 23.5 | 0.8 | 60.0 | 0.1 | 72.4 | 0.1 |
| 0 | 19.1 | 0.4 | 57.4 | 0.1 | 67.5 | 0.8 |

### Example 10. Screening of CIITA Guide RNAs

[0605] CIITA gRNAs were screened for efficacy in T cells by assessing knockdown of MHC class II cell surface expression using both Cas9 and BC22. The percentage of T cells negative for MHC class II protein was assayed following CIITA editing by electroporation with RNP.

### 10.1. RNP Electroporation of T Cells

[0606] Cas9 editing activity was assessed using electroporation of Cas9 ribonucleoprotein (RNP). Upon thaw, Pan CD3+ T cells (StemCell, HLA-A*02.01/A*03.01) were plated at a density of 0.5×10\hat{ }6 cells/mL in T cell RPMI media composed of RPMI 1640 (Invitrogen, Cat. 22400-089) containing 5% (v/v) of fetal bovine serum, 1× Glutamax (Gibco, Cat. 35050-061), 50 μM of 2-Mercaptoethanol, 100 uM non-essential amino acids (Invitrogen, Cat. 11140-050), 1 mM sodium pyruvate, 10 mM HEPES buffer, 1% of Penicillin-Streptomycin, and 100 U/mL of recombinant human interleukin-2 (Peprotech, Cat. 200-02). T cells were activated with TransAct™ (1:100 dilution, Miltenyi Biotec). Cells were expanded in T cell RPMI media for 72 hours prior to RNP transfection.

[0607] CIITA targeting sgRNAs were removed from their storage plates and denatured for 2 minutes at 95° C. before cooling at room temperature for 10 minutes. RNP mixture of 20 uM sgRNA and 10 uM recombinant Cas9-NLS protein (SEQ ID No. 36) was prepared and incubated at 25° C. for 10 minutes. Five μL of RNP mixture was combined with 100,000 cells in 20 μL P3 electroporation Buffer (Lonza). 22 μL of RNP/cell mix was transferred to the corresponding wells of a Lonza shuttle 96-well electroporation plate. Cells were electroporated in duplicate with the manufacturer's pulse code. T cell RPMI media was added to the cells immediately post electroporation. Electroporated T cells were subsequently cultured and collected for NGS sequencing as described in Example 1 at 2 days post edit.

### 10.2 Flow Cytometry

[0608] On day 10 post-edit, T cells were phenotyped by flow cytometry to determine HLA class II protein expression. Briefly, T cells were incubated in cocktails of antibodies targeting HLA-DR, DQ, DP-PE (BioLegend® Cat. No. 361704) and Isotype Control-AF647 (BioLegend® Cat. No. 400234). Cells were subsequently washed, processed on a Cytoflex flow cytometer (Beckman Coulter) and analyzed using the FlowJo software package. T cells were gated based on size, shape, viability, and MHC II expression. DNA samples were subjected to PCR and subsequent NGS analysis, as described in Example 1.

10.3. mRNA Electroporation of T Cells

[0609] BC22 editing activity was assayed following CIITA editing by electroporation with mRNA and guide. Upon thaw, Pan CD3+ T cells isolated from a commercially obtained leukopak (StemCell) were plated at a density of 0.5×10\hat{ }6 cells/mL in T cell R10 media composed of RPMI 1640 (Invitrogen, Cat. 22400-089) containing 10% (v/v) of fetal bovine serum, 2 mM Glutamax (Gibco, Cat. 35050-061), 22 μM of 2-Mercaptoethanol, 100 uM non-essential amino acids (Invitrogen, Cat. 11140-050), 1 mM sodium pyruvate, 10 mM HEPES buffer, 1% of Penicillin-Streptomycin, plus 100 U/mL of recombinant human interleukin-2 (Peprotech, Cat. 200-02). T cells were activated with Dynabeads® Human T-Activator CD3/CD28 (ThermoFisher). Cells were expanded in T cell for 72 hours prior to mRNA transfection.

[0610] CIITA sgRNAs were removed from their storage plates and denatured for 2 minutes at 95° C. before cooling at room temperature for 10 minutes. Fifty microliter electroporation mix was prepared with 100,00 T cells in P3 buffer (Lonza) and 10 ng/uL mRNA encoding UGI (SEQ ID NO: 26), 10 ng/uL mRNA encoding BC22 (SEQ ID NO: 20) and 2 uM sgRNA. This mix was transferred to the corresponding wells of a Lonza shuttle 96-well electroporation plate. Cells were electroporated in duplicate wells using Lonza shuttle 96 w program with the manufacturer's pulse code. R10 media with IL-2 was added to the cells immediately post electroporation. Electroporated T cells were subsequently cultured and collected for NGS sequencing and flow cytometry 10 days post edit. Flow cytometry was performed as described for Cas9 RNP treated cells above. DNA samples were subjected to PCR and subsequent NGS analysis, as described in Example 1.

[0611] Table 31 and FIG. 22 show mean percentage of T cells negative for cell surface expression of MHC Class II proteins HLA-DR, DQ, DP using Cas9 and BC22 in relation to the distance from the cut site to the splice site boundary nucleotide. For each guide, the genomic coordinate of the cut site with SpCas9 is shown, as well as the distance (# of nucleotides) between the acceptor splice site boundary nucleotide or the donor splice site boundary nucleotide and the cut site. Positive numerical values show the number of nucleotides in the 5′directed between a splice site boundary nucleotide and cut site, whereas the negative numerical values show the number of nucleotides in the 3′ direction between a splice site boundary nucleotide and cut site.

TABLE 31
Guide position vs. protein knockdown efficiency

| | Distance | | | | |
|---|---|---|---|---|---|
| | from Cut | BC22 | | Cas9 | |
| | Site | Mean % MHC | | Mean % MHC | |
| Guide | (bp) | II negative | SD | II negative | SD |
| G018075 | 11 | 88.3 | 1.56 | 54.7 | 3.54 |
| G018076 | 10 | 88.45 | 0.64 | 51.45 | 6.29 |
| G018077 | 9 | 69.15 | 2.48 | 55.9 | 0.14 |
| G018078 | 4 | 71.35 | 4.17 | 83.65 | 3.04 |
| G018081 | 0 | 37.9 | 1.27 | 91.1 | 0.42 |
| G018082 | −1 | 36.75 | 1.91 | 93.6 | 2.26 |
| G018084 | −7 | 45.25 | 3.75 | 44 | 3.39 |
| G018085 | −8 | 45.75 | 2.19 | 32.95 | 0.92 |

### Example 11—Screening of HLA-A Guides with BC22n and Cas9

[0612] HLA-A guide RNAs were screened for efficacy in T cells by assessing loss of HLA-A cell surface expression. The percentage of T cells negative for HLA-A protein in an HLA-A2 background (“% HLA-A2-”) was assayed by flow cytometry following HLA-A editing by mRNA delivery.

11.1. mRNA Electroporation of T Cells

[0613] Cas9 and BC22n editing activity was assessed using electroporation of mRNA encoding Cas9 (SEQ ID NO: 11), mRNA encoding BC22n (SEQ ID NO: 2), or mRNA encoding UGI (SEQ ID NO: 26), as provided below. Upon thaw, Pan CD3+ T cells (StemCell, HLA-A*02.01/A*02.01) were plated at a density of 1×10\hat{ }6 cells/mL in TCGM composed of CTS OpTmizer T Cell Expansion SFM (Thermofisher, Cat. A3705001) supplemented with 5% human AB serum (Gemini, Cat. 100-512), 1× GlutaMAX (Thermofisher, Cat. 35050061), 10 mM HEPES (Thermofisher, Cat. 15630080), 1× of Penicillin-Streptomycin, further supplemented with 200 U/mL IL-2 (Peprotech, Cat. 200-02), 10 ng/ml IL-7 (Peprotech, Cat. 200-07), 10 ng/ml IL-15 (Peprotech, Cat. 200-15). T cells were activated with TransAct™ (1:100 dilution, Miltenyi Biotec). Cells were expanded in T cell RPMI media for 72 hours at 37° C. prior to mRNA electroporation.

[0614] HLA-A sgRNAs were removed from their storage plates and denatured for 2 minutes at 95° C. before incubating at room temperature for 5 minutes. BC22n electroporation mix was prepared with 100,000 T cells in P3 buffer (Lonza), 200 ng of mRNA encoding UGI, 200 ng of mRNA encoding BC22n and 20 pmoles of sgRNA. Cas9 electroporation mix was prepared with 100,000 T cells in P3 buffer (Lonza), 200 ng of mRNA encoding UGI, 200 ng of mRNA encoding Cas9 and 20 pmoles of sgRNA. Each mix was transferred to the corresponding wells of a Lonza shuttle 96-well electroporation plate. Cells were electroporated in duplicate using Lonza shuttle 96 w using manufacturer's pulse code. Immediately post electroporation, cells were recovered in pre-warmed TCGM without cytokines and incubated at 37° C. for 15 minutes. Electroporated T cells were subsequently cultured in TCGM with further supplemented with 200 U/mL IL-2 (Peprotech, Cat. 200-02), 10 ng/ml IL-7 (Peprotech, Cat. 200-07), 10 ng/ml IL-15 (Peprotech, Cat. 200-15) and collected for flow cytometry 8 days post edit.

### 11.2. Flow Cytometry

[0615] On day 8 post-edit, T cells were phenotyped by flow cytometry to determine HLA-A protein expression. Briefly, T cells were incubated with antibodies targeting HLA-A2, (eBioscience Cat. No. 17-9876-42). Cells were subsequently washed, processed on a Cytoflex flow cytometer (Beckman Coulter) and analyzed using the FlowJo software package. T cells were gated based on size, shape, viability, and HLA-A2 expression. Table 32 shows the percentage of cells negative for HLA-A surface proteins following genomic editing of HLA-A with BC22n or Cas9.

TABLE 32
Percentage of cells negative for HLA-A surface protein
following genomic editing of HLA-A with BC22n or Cas9.

| | BC22n | | Cas9 | |
|---|---|---|---|---|
| | Mean | SD % | Mean | SD % |
| Guide ID | % A2- | A2- | % A2- | A2- |
| G018932 | 20.15 | 2.76 | 43.30 | 1.70 |
| G018933 | 10.35 | 1.20 | 74.00 | 0.57 |
| G018934 | 0.50 | 0.14 | 15.30 | 1.56 |
| G018935 | 0.00 | 0.00 | 69.30 | 0.28 |
| G018936 | 0.10 | 0.00 | 29.65 | 2.62 |
| G018937 | 0.15 | 0.07 | 50.50 | 0.71 |
| G018938 | 0.00 | 0.00 | 0.00 | 0.00 |
| G018939 | 0.00 | 0.00 | 44.90 | 1.27 |
| G018940 | 0.00 | 0.00 | 12.00 | 0.42 |
| G018941 | 0.00 | 0.00 | 2.65 | 0.35 |
| G018942 | 0.10 | 0.00 | 2.15 | 0.07 |
| G018943 | 0.00 | 0.00 | 16.20 | 0.42 |
| G018944 | 0.00 | 0.00 | 3.00 | 0.28 |
| G018945 | 0.05 | 0.07 | 3.20 | 0.42 |
| G018946 | 0.00 | 0.00 | 2.30 | 0.14 |
| G018947 | 0.00 | 0.00 | 1.55 | 0.49 |
| G018949 | 0.00 | 0.00 | 47.10 | 0.57 |
| G018950 | 0.00 | 0.00 | 0.30 | 0.00 |
| G018951 | 0.00 | 0.00 | 13.30 | 0.28 |
| G018952 | 0.00 | 0.00 | 0.50 | 0.00 |
| G018953 | 0.00 | 0.00 | 3.65 | 0.64 |
| G018955 | 0.20 | 0.14 | 5.20 | 0.28 |
| G018958 | 0.00 | 0.00 | 1.30 | 0.28 |
| G018959 | 0.00 | 0.00 | 3.70 | 0.14 |
| G018960 | 0.00 | 0.00 | 0.35 | 0.07 |
| G018961 | 0.00 | 0.00 | 0.40 | 0.00 |
| G018962 | 0.00 | 0.00 | 2.90 | 0.42 |
| G018963 | 0.00 | 0.00 | 12.50 | 0.14 |
| G018964 | 0.00 | 0.00 | 6.45 | 0.64 |
| G018965 | 0.00 | 0.00 | 0.90 | 0.00 |
| G018966 | 0.00 | 0.00 | 1.30 | 0.14 |
| G018968 | 0.10 | 0.00 | 0.10 | 0.00 |
| G018969 | 0.00 | 0.00 | 0.80 | 0.14 |
| G018970 | 0.00 | 0.00 | 0.95 | 0.07 |
| G018971 | 0.00 | 0.00 | 0.10 | 0.00 |
| G018972 | 0.05 | 0.07 | 3.40 | 0.28 |
| G018973 | 0.00 | 0.00 | 1.35 | 0.07 |
| G018974 | 0.00 | 0.00 | 0.45 | 0.07 |
| G018976 | 0.05 | 0.07 | 2.45 | 0.07 |
| G018977 | 0.00 | 0.00 | 12.45 | 1.06 |
| G018978 | 0.00 | 0.00 | 1.75 | 0.07 |
| G018979 | 0.05 | 0.07 | 37.40 | 0.71 |
| G018980 | 0.05 | 0.07 | 32.40 | 2.40 |
| G018981 | 0.00 | 0.00 | 17.45 | 0.35 |
| G018982 | 0.00 | 0.00 | 26.35 | 0.92 |
| G018983 | 0.00 | 0.00 | 0.25 | 0.07 |
| G018984 | 0.00 | 0.00 | 0.65 | 0.07 |
| G018986 | 0.00 | 0.00 | 1.85 | 0.21 |
| G018987 | 0.00 | 0.00 | 2.25 | 0.07 |
| G018988 | 0.00 | 0.00 | 0.15 | 0.07 |
| G018989 | 0.00 | 0.00 | 1.85 | 0.07 |
| G018990 | 0.25 | 0.07 | 17.45 | 1.06 |
| G018991 | 0.20 | 0.00 | 23.15 | 0.92 |
| G018992 | 0.20 | 0.14 | 38.15 | 0.07 |
| G018993 | 0.15 | 0.07 | 12.15 | 1.34 |
| G018994 | 4.35 | 0.35 | 23.75 | 0.49 |
| G018995 | 0.55 | 0.07 | 94.27 | 0.30 |
| G018996 | 0.85 | 0.07 | 92.39 | 0.83 |
| G018997 | 97.80 | 0.08 | 95.03 | 1.87 |
| G018998 | 74.75 | 7.71 | 93.33 | 0.18 |
| G018999 | 98.26 | 0.30 | 96.05 | 2.27 |
| G019000 | 9.05 | 0.35 | 94.67 | 0.74 |
| G019001 | 0.05 | 0.07 | 4.05 | 0.64 |
| G019002 | 0.00 | 0.00 | 0.05 | 0.07 |
| G019003 | 0.00 | 0.00 | 11.10 | 0.00 |
| G019004 | 0.00 | 0.00 | 30.70 | 0.00 |
| G019005 | 0.00 | 0.00 | 1.65 | 0.35 |
| G019006 | 0.00 | 0.00 | 4.75 | 0.49 |
| G019007 | 0.00 | 0.00 | 5.35 | 0.78 |
| G019008 | 0.00 | 0.00 | 55.20 | 3.54 |
| G019009 | 0.00 | 0.00 | 19.55 | 2.19 |
| G019010 | 0.05 | 0.07 | 5.40 | 0.14 |
| G019011 | 0.00 | 0.00 | 4.40 | 0.85 |
| G019012 | 0.05 | 0.07 | 22.90 | 2.55 |
| G019013 | 0.00 | 0.00 | 30.60 | 2.40 |
| G019014 | 0.05 | 0.07 | 14.65 | 0.49 |
| G019015 | 0.00 | 0.00 | 44.70 | 1.70 |
| G019016 | 0.00 | 0.00 | 13.95 | 0.35 |
| G019017 | 0.00 | 0.00 | 2.35 | 0.35 |
| G019018 | 0.00 | 0.00 | 19.90 | 0.00 |
| G019019 | 0.00 | 0.00 | 3.20 | 0.14 |
| G021205 | 0.00 | 0.00 | 0.00 | 0.00 |
| G021206 | 0.00 | 0.00 | 4.10 | 0.28 |
| G021207 | 0.00 | 0.00 | 2.80 | 0.28 |
| G021208 | 84.75 | 2.05 | 58.50 | 0.28 |
| G021209 | 97.96 | 0.16 | 83.35 | 1.77 |
| G021210 | 71.45 | 2.90 | 75.20 | 1.70 |
| G021211 | 0.10 | 0.00 | 67.80 | 1.70 |

### Example 12—T Cell Editing, CIITA Guide RNAs with Cas9 and BC22

### 12.1 T Cell Preparation

[0616] T cells were edited at the CIITA locus with UGI in trans and either BC22 or Cas9 to assess the impact on editing type on MHC class II antigens.

[0617] T cells were prepared from a leukopak using the EasySep Human T cell Isolation Kit (Stem Cell Technology, Cat. 17951) following the manufacturers protocol. T cells were cryopreserved in Cryostor CS10 freezing media (Cat. 07930) for future use. Upon thaw, T cells were plated at a density of 1.0×10\hat{ }6 cells/mL in T cell R10 media composed of RPMI 1640 (Corning, Cat. 10-040-CV) containing 10% (v/v) of fetal bovine serum, 2 mM Glutamax (Gibco, Cat. 35050-061), 22 μM of 2-Mercaptoethanol, 100 uM non-essential amino acids (Corning, Cat. 25-025-Cl), 1 mM sodium pyruvate, 10 mM HEPES buffer, 1% of Penicillin-Streptomycin, plus 100 U/mL of recombinant human interleukin-2 (Peprotech, Cat. 200-02). T cells were activated with Dynabeads® Human T-Activator CD3/CD28 (Gibco, Cat. 11141D). Cells were expanded in T cell media for 72 hours prior to mRNA transfection.

12.2 T Cell Editing with RNA Electroporation

[0618] Solutions containing mRNA encoding Cas9 protein (SEQ ID NO: 8), BC22 (SEQ ID NO: 20) or UGI (SEQ ID NO 26) were prepared in sterile water. 50 μM CIITA targeting sgRNAs were removed from their storage plates and denatured for 2 minutes at 95° C. before cooling on ice. Seventy-two hours post activation, T cells were harvested, centrifuged, and resuspended at a concentration of 12.5×10\hat{ }6 T cells/mL in P3 electroporation buffer (Lonza). For each well to be electroporated, 1×10\hat{ }5 T cells were mixed with 200 ng of editor mRNA, 200 ng of UGI mRNA and 20 pmols of sgRNA as described in Table 33 in a final volume of 20 uL of P3 electroporation buffer. This mix was transferred in duplicate to a 96-well Nucleofector™ plate and electroporated using the manufacturer's pulse code. Electroporated T cells were rested in 180 ul of R10 media plus 100 U/mL of recombinant human interleukin-2 before being transferred to a new flat-bottom 96-well plate. The resulting plate was incubated at 37° C. for 4 days. On day 10 post-editing cells were collected for flow cytometry analysis and NGS sequencing.

### 12.3 Flow Cytometry and NGS Sequencing

[0619] On day 10 post-editing, T cells were phenotyped by flow cytometry to determine MHC class II protein expression as described in Example 6 using antibodies targeting HLA-DR, DQ, DP-PE (BioLegend® Cat. No. 361704) and Isotype Control-PE (BioLegend® Cat. No. 400234). DNA samples were subjected to PCR and subsequent NGS analysis, as described in Example 1. Table 33 shows CIITA gene editing and MHC class II negative results for cells edited with BC22. Table 34 shows CIITA gene editing and MHC class II negative results for cells edited with Cas9.

TABLE 33
Percent editing and percent of MHC-II negative cells
following CIITA editing with BC22

| | | | | | | | | | | % MHC Class II | | |
|---|---|---|---|---|---|---|---|---|---|---|---|---|
| | % C to T | | | % A to G | | | % Indel | | | negative | | |
| Guide | Mean | SD | n | Mean | SD | n | Mean | SD | n | Mean | SD | n |
| G016030 | 40.2 | 14.2 | 2 | 3.5 | 1.1 | 2 | 2.4 | 1.1 | 2 | 39.7 | 5.6 | 2 |
| G016031 | 58.8 | 0.0 | 1 | 3.4 | 3.2 | 2 | 0.6 | 0.8 | 2 | 41.5 | 3.0 | 2 |
| G016032 | 1.8 | 0.6 | 2 | 18.2 | 1.3 | 2 | 75.2 | 0.6 | 2 | 45.9 | 4.2 | 2 |
| G016033 | 1.6 | 0.1 | 2 | 30.7 | 2.2 | 2 | 18.0 | 5.2 | 2 | 38.5 | 1.5 | 2 |
| G016034 | 52.8 | 14.8 | 2 | 1.5 | 0.5 | 2 | 2.0 | 0.3 | 2 | 41.8 | 2.2 | 2 |
| G016035 | 50.3 | 14.5 | 2 | 1.6 | 0.6 | 2 | 1.4 | 0.4 | 2 | 40.8 | 2.5 | 2 |
| G016036 | 14.2 | 4.9 | 2 | 2.2 | 0.3 | 2 | 2.4 | 0.3 | 2 | 40.1 | 2.4 | 2 |
| G016037 | 10.1 | 4.5 | 2 | 1.3 | 0.4 | 2 | 0.3 | 0.1 | 2 | 38.2 | 0.8 | 2 |
| G016038 | 71.3 | 6.5 | 2 | 3.2 | 0.1 | 2 | 3.0 | 0.6 | 2 | 45.6 | 2.6 | 2 |
| G016039 | 66.0 | 5.9 | 2 | 5.0 | 0.1 | 2 | 10.5 | 2.9 | 2 | 38.6 | 0.5 | 2 |
| G016040 | No data | | | 0.0 | 0.0 | 1 | 0.0 | 0.0 | 1 | 38.4 | 0.7 | 2 |
| G016041 | No data | | | 3.1 | 4.3 | 2 | 3.3 | 1.2 | 2 | 40.4 | 2.1 | 2 |
| G016042 | 21.5 | 7.9 | 2 | 3.2 | 0.1 | 2 | 1.6 | 0.9 | 2 | 44.4 | 3.7 | 2 |
| G016043 | 44.7 | 11.5 | 2 | 2.3 | 0.1 | 2 | 3.2 | 0.5 | 2 | 40.5 | 1.6 | 2 |
| G016044 | 93.4 | 2.3 | 2 | 1.8 | 0.4 | 2 | 4.9 | 0.7 | 2 | 39.9 | 0.9 | 2 |
| G016045 | 7.1 | 3.0 | 2 | 1.2 | 0.1 | 2 | 2.2 | 0.2 | 2 | 39.8 | 0.7 | 2 |
| G016046 | 63.7 | 11.5 | 2 | 2.9 | 0.1 | 2 | 3.3 | 0.1 | 2 | 46.4 | 1.4 | 2 |
| G016047 | 72.7 | 3.0 | 2 | 2.9 | 0.2 | 2 | 4.6 | 0.9 | 2 | 45.4 | 2.0 | 2 |
| G016048 | 6.2 | 2.4 | 2 | 2.4 | 0.1 | 2 | 0.2 | 0.1 | 2 | 38.4 | 0.5 | 2 |
| G016049 | 66.8 | 9.0 | 2 | 5.4 | 0.1 | 2 | 2.8 | 0.1 | 2 | 42.4 | 2.5 | 2 |
| G016050 | 45.4 | 9.0 | 2 | 2.3 | 0.3 | 2 | 3.0 | 0.6 | 2 | 39.1 | 2.8 | 2 |
| G016051 | 86.2 | 5.9 | 2 | 3.7 | 0.1 | 2 | 1.3 | 0.3 | 2 | 39.5 | 0.6 | 2 |
| G016052 | 53.7 | 13.7 | 2 | 4.2 | 0.9 | 2 | 7.4 | 0.4 | 2 | 42.1 | 1.8 | 2 |
| G016053 | 38.6 | 18.7 | 2 | 1.3 | 0.3 | 2 | 3.1 | 0.8 | 2 | 40.4 | 1.7 | 2 |
| G016054 | 42.0 | 10.7 | 2 | 1.9 | 0.1 | 2 | 2.1 | 0.4 | 2 | 42.1 | 4.2 | 2 |
| G016055 | 36.6 | 13.1 | 2 | 3.5 | 0.9 | 2 | 8.2 | 2.3 | 2 | 41.3 | 1.5 | 2 |
| G016056 | 78.0 | 9.1 | 2 | 3.4 | 0.1 | 2 | 2.0 | 0.1 | 2 | 39.8 | 3.4 | 2 |
| G016057 | 73.3 | 9.1 | 2 | 3.4 | 0.6 | 2 | 5.3 | 0.0 | 2 | 39.7 | 1.3 | 2 |
| G016058 | 75.0 | 9.1 | 2 | 1.7 | 0.1 | 2 | 4.2 | 0.0 | 2 | 46.0 | 2.3 | 2 |
| G016059 | 66.5 | 12.0 | 2 | 4.3 | 0.2 | 2 | 4.7 | 0.7 | 2 | 41.0 | 0.8 | 2 |
| G016060 | 55.6 | 5.2 | 2 | 3.5 | 0.4 | 2 | 10.7 | 1.0 | 2 | 44.2 | 1.6 | 2 |
| G016061 | 65.5 | 9.3 | 2 | 2.5 | 0.4 | 2 | 1.2 | 0.0 | 2 | 38.6 | 2.0 | 2 |
| G016062 | 65.8 | 9.1 | 2 | 3.0 | 0.2 | 2 | 4.3 | 0.3 | 2 | 39.8 | 0.1 | 2 |
| G016063 | 10.2 | 4.2 | 2 | 0.9 | 0.2 | 2 | 0.3 | 0.1 | 2 | 39.9 | 2.5 | 2 |
| G016064 | 66.8 | 12.2 | 2 | 3.5 | 0.0 | 2 | 4.4 | 1.1 | 2 | 59.2 | 2.2 | 2 |
| G016065 | 13.5 | 5.5 | 2 | 0.6 | 0.2 | 2 | 1.1 | 0.4 | 2 | 40.4 | 2.5 | 2 |
| G016066 | 0.1 | 0.0 | 2 | 0.7 | 0.1 | 2 | 0.3 | 0.0 | 2 | 35.4 | 1.5 | 2 |
| G016067 | 82.7 | 6.4 | 2 | 2.6 | 0.6 | 2 | 4.6 | 0.2 | 2 | 59.8 | 1.2 | 2 |
| G016068 | 60.1 | 8.9 | 2 | 2.5 | 0.8 | 2 | 1.1 | 0.1 | 2 | 54.0 | 0.7 | 2 |
| G016069 | 55.8 | 11.6 | 2 | 2.6 | 0.6 | 2 | 2.6 | 1.1 | 2 | 34.3 | 4.0 | 2 |
| G016070 | 76.5 | 9.6 | 2 | 3.5 | 1.0 | 2 | 4.4 | 0.3 | 2 | 53.3 | 1.7 | 2 |
| G016071 | 54.3 | 6.8 | 2 | 4.1 | 0.5 | 2 | 1.4 | 0.6 | 2 | 45.8 | 0.1 | 2 |
| G016072 | 82.0 | 0.0 | 1 | 4.1 | 0.0 | 1 | 5.1 | 0.0 | 1 | 25.1 | 1.1 | 2 |
| G016073 | 63.4 | 11.1 | 2 | 3.5 | 0.5 | 2 | 0.9 | 0.0 | 2 | 38.7 | 1.3 | 2 |
| G016074 | 62.7 | 13.0 | 2 | 3.9 | 0.2 | 2 | 4.2 | 0.7 | 2 | 53.3 | 2.0 | 2 |
| G016075 | 41.2 | 17.2 | 2 | 1.0 | 0.4 | 2 | 8.0 | 1.7 | 2 | 48.1 | 0.7 | 2 |
| G016076 | 42.8 | 14.3 | 2 | 0.9 | 0.1 | 2 | 10.2 | 2.8 | 2 | 55.6 | 2.9 | 2 |
| G016077 | 65.1 | 10.6 | 2 | 5.4 | 0.2 | 2 | 2.4 | 0.1 | 2 | 46.0 | 0.2 | 2 |
| G016078 | 44.1 | 15.1 | 2 | 2.0 | 0.6 | 2 | 6.6 | 2.0 | 2 | 41.6 | 0.1 | 2 |
| G016079 | 79.8 | 4.9 | 2 | 5.6 | 0.5 | 2 | 4.6 | 0.9 | 2 | 53.4 | 2.8 | 2 |
| G016080 | 39.0 | 12.2 | 2 | 4.3 | 0.6 | 2 | 13.1 | 3.1 | 2 | 49.5 | 3.1 | 2 |
| G016081 | 9.6 | 4.9 | 2 | 0.5 | 0.3 | 2 | 2.5 | 0.8 | 2 | 39.0 | 0.3 | 2 |
| G016082 | 20.3 | 8.6 | 2 | 2.0 | 0.3 | 2 | 7.0 | 3.3 | 2 | 40.1 | 4.1 | 2 |
| G016083 | 74.5 | 9.8 | 2 | 3.6 | 0.1 | 2 | 8.0 | 0.6 | 2 | 48.6 | 2.3 | 2 |
| G016084 | 46.0 | 8.5 | 2 | 3.9 | 0.0 | 2 | 23.5 | 3.2 | 2 | 54.5 | 0.7 | 2 |
| G016085 | 35.6 | 6.7 | 2 | 1.4 | 0.1 | 2 | 1.6 | 0.1 | 2 | 41.9 | 3.0 | 2 |
| G016086 | 75.0 | 10.3 | 2 | 3.9 | 0.4 | 2 | 3.5 | 0.2 | 2 | 63.1 | 1.3 | 2 |
| G016087 | 45.3 | 9.9 | 2 | 1.2 | 0.1 | 2 | 3.4 | 0.5 | 2 | 40.3 | 3.7 | 2 |
| G016088 | 67.8 | 10.5 | 2 | 5.6 | 1.4 | 2 | 6.9 | 1.4 | 2 | 44.1 | 3.3 | 2 |
| G016089 | 64.4 | 10.5 | 2 | 4.5 | 0.1 | 2 | 1.5 | 0.3 | 2 | 38.3 | 1.8 | 2 |
| G016090 | 67.1 | 7.1 | 2 | 1.7 | 0.1 | 2 | 16.9 | 2.2 | 2 | 61.3 | 2.3 | 2 |
| G016091 | 47.4 | 12.0 | 2 | 2.1 | 0.9 | 2 | 2.9 | 2.2 | 2 | 54.0 | 3.9 | 2 |
| G016092 | 71.4 | 11.5 | 2 | 3.3 | 0.1 | 2 | 6.5 | 0.5 | 2 | 54.9 | 0.9 | 2 |
| G016093 | 76.6 | 8.3 | 2 | 3.3 | 0.2 | 2 | 3.7 | 0.1 | 2 | 52.2 | 2.5 | 2 |
| G016094 | 75.5 | 7.5 | 2 | 3.6 | 0.4 | 2 | 1.7 | 0.2 | 2 | 44.0 | 2.5 | 2 |
| G016095 | 76.1 | 7.2 | 2 | 7.6 | 0.4 | 2 | 2.8 | 0.4 | 2 | 44.1 | 0.4 | 2 |
| G016096 | 77.6 | 8.5 | 2 | 2.1 | 0.2 | 2 | 4.6 | 0.4 | 2 | 41.2 | 3.0 | 2 |
| G016097 | 44.7 | 15.0 | 2 | 2.2 | 0.1 | 2 | 0.7 | 0.1 | 2 | 38.6 | 3.2 | 2 |
| G016098 | 28.9 | 8.8 | 2 | 1.6 | 0.4 | 2 | 1.6 | 0.2 | 2 | 40.1 | 4.7 | 2 |
| G016099 | 68.8 | 11.9 | 2 | 2.2 | 0.1 | 2 | 3.9 | 0.7 | 2 | 44.8 | 1.0 | 2 |
| G016100 | 85.4 | 6.9 | 2 | 2.4 | 0.6 | 2 | 3.3 | 0.4 | 2 | 43.5 | 1.9 | 2 |
| G016101 | 4.8 | 1.1 | 2 | 0.8 | 0.1 | 2 | 0.2 | 0.0 | 2 | 38.0 | 3.3 | 2 |
| G016102 | 57.5 | 14.4 | 2 | 1.9 | 0.1 | 2 | 2.3 | 0.4 | 2 | 42.6 | 3.3 | 2 |
| G016103 | 69.4 | 12.8 | 2 | 2.4 | 0.0 | 2 | 5.6 | 0.5 | 2 | 39.1 | 2.7 | 2 |
| G016104 | 66.5 | 12.2 | 2 | 1.6 | 0.7 | 2 | 11.1 | 0.4 | 2 | 49.0 | 3.3 | 2 |
| G016105 | 58.4 | 14.3 | 2 | 4.4 | 0.6 | 2 | 8.3 | 0.7 | 2 | 38.4 | 3.0 | 2 |
| G016106 | 74.8 | 5.7 | 2 | 3.3 | 0.3 | 2 | 7.3 | 0.3 | 2 | 51.8 | 0.1 | 2 |
| G016107 | 45.2 | 12.2 | 2 | 5.8 | 1.1 | 2 | 5.4 | 0.8 | 2 | 39.6 | 1.0 | 2 |
| G016108 | 15.3 | 3.5 | 2 | 1.2 | 0.1 | 2 | 1.2 | 0.4 | 2 | 41.5 | 0.1 | 2 |
| G016109 | 77.5 | 3.7 | 2 | 4.5 | 0.4 | 2 | 3.4 | 0.6 | 2 | 48.3 | 2.5 | 2 |
| G016110 | 43.1 | 15.3 | 2 | 1.7 | 0.2 | 2 | 6.9 | 1.6 | 2 | 45.4 | 0.6 | 2 |
| G016111 | 89.2 | 1.3 | 2 | 4.2 | 0.1 | 2 | 5.6 | 0.8 | 2 | 40.6 | 4.4 | 2 |
| G016112 | 68.8 | 13.2 | 2 | 3.8 | 0.4 | 2 | 1.4 | 0.1 | 2 | 43.4 | 2.7 | 2 |
| G016113 | 65.2 | 9.8 | 2 | 3.6 | 0.2 | 2 | 6.9 | 1.1 | 2 | 58.3 | 2.5 | 2 |
| G016114 | 75.5 | 11.5 | 2 | 2.7 | 0.1 | 2 | 5.1 | 0.6 | 2 | 38.9 | 4.0 | 2 |
| G016115 | 72.1 | 8.6 | 2 | 1.2 | 0.1 | 2 | 7.9 | 0.3 | 2 | 60.2 | 0.9 | 2 |
| G016116 | 36.3 | 7.5 | 2 | 2.3 | 0.8 | 2 | 3.0 | 0.4 | 2 | 41.1 | 0.4 | 2 |
| G016117 | 75.4 | 7.7 | 2 | 3.5 | 0.4 | 2 | 5.9 | 0.4 | 2 | 37.1 | 2.8 | 2 |

TABLE 34
Percent editing and percent of MHC-II negative cells
following CIITA editing with Cas9

| | | | | | | | | | | % MHC Class II | | |
|---|---|---|---|---|---|---|---|---|---|---|---|---|
| | % C to T | | | % A to G | | | % Indel | | | negative | | |
| Guide | Mean | SD | n | Mean | SD | N | Mean | SD | n | Mean | SD | n |
| G016030 | 0.0 | 0.0 | 2 | 0.4 | 0.0 | 2 | 30.1 | 8.3 | 2 | 42.7 | 0.4 | 2 |
| G016031 | 0.0 | 0.0 | 1 | 0.1 | 0.0 | 1 | 79.5 | 0.0 | 1 | 45.9 | 1.0 | 2 |
| G016032 | 0.1 | 0.1 | 2 | 14.8 | 2.6 | 2 | 77.7 | 4.8 | 2 | 43.6 | 0.1 | 2 |
| G016033 | 0.1 | 0.1 | 2 | 16.1 | 2.4 | 2 | 61.5 | 5.3 | 2 | 44.1 | 1.8 | 2 |
| G016034 | 0.0 | 0.0 | 2 | 0.1 | 0.0 | 2 | 49.7 | 6.2 | 2 | 46.1 | 2.7 | 2 |
| G016035 | 0.0 | 0.0 | 2 | 0.1 | 0.0 | 2 | 44.7 | 6.4 | 2 | 46.2 | 0.6 | 2 |
| G016036 | 0.0 | 0.0 | 2 | 1.8 | 0.3 | 2 | 5.6 | 0.1 | 2 | 38.3 | 1.8 | 2 |
| G016037 | 0.1 | 0.1 | 2 | 1.2 | 0.1 | 2 | 3.4 | 0.4 | 2 | 35.9 | 1.1 | 2 |
| G016038 | 0.0 | 0.0 | 2 | 0.6 | 0.1 | 2 | 88.3 | 3.5 | 2 | 65.7 | 2.9 | 2 |
| G016039 | 0.0 | 0.0 | 2 | 0.1 | 0.0 | 2 | 91.9 | 2.6 | 2 | 62.9 | 2.5 | 2 |
| G016040 | No data | | | | | | | | | 63.2 | 0.6 | 2 |
| G016041 | No data | | | | | | | | | 62.3 | 0.6 | 2 |
| G016042 | 0.0 | 0.0 | 2 | 1.5 | 0.3 | 2 | 40.6 | 10.8 | 2 | 43.9 | 0.6 | 2 |
| G016043 | 0.0 | 0.0 | 2 | 1.3 | 0.1 | 2 | 26.7 | 4.9 | 2 | 42.9 | 0.4 | 2 |
| G016044 | No data | | | 0.2 | 0.0 | 1 | 74.4 | 0.0 | 1 | 54.9 | 0.8 | 2 |
| G016045 | 0.1 | 0.1 | 2 | 0.8 | 0.0 | 2 | 13.9 | 4.3 | 2 | 40.6 | 0.8 | 2 |
| G016046 | 0.0 | 0.0 | 2 | 0.2 | 0.1 | 2 | 92.8 | 2.4 | 2 | 62.5 | 0.6 | 2 |
| G016047 | 0.1 | 0.1 | 2 | 0.2 | 0.0 | 2 | 80.0 | 2.0 | 2 | 59.8 | 0.9 | 2 |
| G016048 | 0.0 | 0.0 | 2 | 2.1 | 0.0 | 2 | 9.3 | 2.5 | 2 | 41.0 | 0.8 | 2 |
| G016049 | 0.0 | 0.0 | 2 | 0.1 | 0.0 | 2 | 85.8 | 3.0 | 2 | 56.9 | 0.3 | 2 |
| G016050 | 0.1 | 0.1 | 2 | 0.6 | 0.1 | 2 | 38.4 | 1.6 | 2 | 45.0 | 0.4 | 2 |
| G016051 | 0.0 | 0.0 | 2 | 0.4 | 0.0 | 2 | 82.6 | 3.6 | 2 | 58.8 | 1.4 | 2 |
| G016052 | 0.1 | 0.1 | 2 | 0.6 | 0.1 | 2 | 69.8 | 7.0 | 2 | 53.8 | 0.4 | 2 |
| G016053 | No data | | | | | | | | | 43.4 | 1.2 | 2 |
| G016054 | 0.0 | 0.0 | 2 | 1.1 | 0.1 | 2 | 28.1 | 7.0 | 2 | 44.9 | 3.2 | 2 |
| G016055 | 0.0 | 0.0 | 2 | 0.6 | 0.1 | 2 | 37.1 | 7.7 | 2 | 47.5 | 0.4 | 2 |
| G016056 | 0.0 | 0.0 | 2 | 0.1 | 0.0 | 2 | 89.5 | 5.3 | 2 | 63.8 | 0.6 | 2 |
| G016057 | 0.0 | 0.0 | 2 | 0.1 | 0.0 | 2 | 84.7 | 4.0 | 2 | 61.6 | 3.1 | 2 |
| G016058 | 0.0 | 0.0 | 2 | 0.2 | 0.1 | 2 | 82.3 | 5.9 | 2 | 60.4 | 2.2 | 2 |
| G016059 | 0.0 | 0.0 | 2 | 0.1 | 0.0 | 2 | 75.1 | 3.7 | 2 | 56.6 | 1.6 | 2 |
| G016060 | 0.0 | 0.0 | 2 | 0.2 | 0.0 | 2 | 84.3 | 3.8 | 2 | 61.5 | 1.8 | 2 |
| G016061 | 0.0 | 0.0 | 2 | 0.1 | 0.0 | 2 | 55.2 | 2.9 | 2 | 47.4 | 0.6 | 2 |
| G016062 | 0.0 | 0.0 | 2 | 0.5 | 0.1 | 2 | 71.1 | 5.9 | 2 | 46.4 | 0.7 | 2 |
| G016063 | 0.0 | 0.0 | 2 | 0.6 | 0.0 | 2 | 5.1 | 1.4 | 2 | 36.1 | 1.4 | 2 |
| G016064 | 0.0 | 0.0 | 2 | 1.3 | 0.1 | 2 | 42.7 | 5.7 | 2 | 49.1 | 0.7 | 2 |
| G016065 | 0.0 | 0.0 | 2 | 0.1 | 0.0 | 2 | 11.0 | 2.0 | 2 | 40.0 | 0.9 | 2 |
| G016066 | 0.0 | 0.0 | 2 | 0.6 | 0.0 | 2 | 0.4 | 0.1 | 2 | 36.8 | 0.6 | 2 |
| G016067 | 0.1 | 0.0 | 2 | 0.1 | 0.0 | 2 | 85.4 | 3.3 | 2 | 59.7 | 3.3 | 2 |
| G016068 | 0.0 | 0.0 | 2 | 0.1 | 0.0 | 2 | 59.2 | 6.9 | | 54.0 | 0.2 | 2 |
| G016069 | 0.0 | 0.0 | 2 | 0.4 | 0.0 | 2 | 39.5 | 3.7 | 2 | 40.7 | 0.0 | 2 |
| G016070 | 0.1 | 0.1 | 2 | 0.1 | 0.1 | 2 | 92.3 | 2.3 | 2 | 66.4 | 3.1 | 2 |
| G016071 | 0.0 | 0.0 | 2 | 0.2 | 0.0 | 2 | 73.1 | 2.2 | 2 | 55.6 | 3.0 | 2 |
| G016072 | 0.0 | 0.0 | 2 | 0.1 | 0.1 | 2 | 91.1 | 1.4 | 2 | 51.6 | 1.1 | 2 |
| G016073 | 0.0 | 0.0 | 2 | 1.5 | 0.1 | 2 | 38.3 | 4.2 | 2 | 43.5 | 0.8 | 2 |
| G016074 | 0.2 | 0.1 | 2 | 0.6 | 0.0 | 2 | 72.4 | 7.5 | 2 | 56.1 | 1.4 | 2 |
| G016075 | 0.1 | 0.1 | 2 | 0.3 | 0.1 | 2 | 72.9 | 10.3 | 2 | 57.8 | 4.4 | 2 |
| G016076 | 0.0 | 0.0 | 2 | 0.3 | 0.1 | 2 | 66.7 | 13.4 | 2 | 58.4 | 4.6 | 2 |
| G016077 | 0.0 | 0.0 | 2 | 0.5 | 0.1 | 2 | 80.0 | 5.2 | 2 | 62.5 | 1.5 | 2 |
| G016078 | 0.1 | 0.1 | 2 | 0.3 | 0.2 | 2 | 59.3 | 10.5 | 2 | 51.6 | 4.5 | 2 |
| G016079 | 0.0 | 0.0 | 2 | 0.7 | 0.1 | 2 | 81.9 | 4.0 | 2 | 58.4 | 1.0 | 2 |
| G016080 | 0.0 | 0.0 | 2 | 0.5 | 0.1 | 2 | 71.8 | 6.2 | 2 | 44.9 | 1.4 | 2 |
| G016081 | 0.0 | 0.0 | 2 | 0.4 | 0.0 | 2 | 8.1 | 1.3 | 2 | 39.1 | 0.7 | 2 |
| G016082 | 0.1 | 0.1 | 2 | 2.1 | 0.0 | 2 | 10.0 | 2.5 | 2 | 39.0 | 0.8 | 2 |
| G016083 | 0.1 | 0.1 | 2 | 0.2 | 0.1 | 2 | 92.2 | 1.5 | 2 | 63.6 | 0.7 | 2 |
| G016084 | 0.0 | 0.0 | 2 | 0.4 | 0.0 | 2 | 70.7 | 6.4 | 2 | 56.1 | 2.6 | 2 |
| G016085 | 0.0 | 0.0 | 2 | 0.3 | 0.1 | 2 | 17.5 | 0.7 | 2 | 42.3 | 0.4 | 2 |
| G016086 | 0.1 | 0.1 | 2 | 0.2 | 0.1 | 2 | 85.8 | 6.1 | 2 | 62.2 | 3.0 | 2 |
| G016087 | 0.0 | 0.0 | 2 | 0.2 | 0.0 | 2 | 89.5 | 2.1 | 2 | 56.1 | 0.1 | 2 |
| G016088 | 0.8 | 0.0 | 2 | 0.3 | 0.1 | 2 | 76.8 | 4.6 | 2 | 58.1 | 0.5 | 2 |
| G016089 | 0.1 | 0.1 | 2 | 0.3 | 0.1 | 2 | 73.3 | 6.4 | 2 | 54.2 | 0.0 | 2 |
| G016090 | 0.2 | 0.0 | 2 | 0.3 | 0.0 | 2 | 88.3 | 5.1 | 2 | 61.2 | 2.3 | 2 |
| G016091 | 0.0 | 0.0 | 1 | 0.7 | 0.0 | 1 | 42.0 | 0.0 | 1 | 49.5 | 3.8 | 2 |
| G016092 | 0.1 | 0.1 | 2 | 0.5 | 0.1 | 2 | 60.9 | 10.0 | 2 | 52.0 | 2.9 | 2 |
| G016093 | 0.0 | 0.0 | 2 | 0.5 | 0.1 | 2 | 68.8 | 8.1 | 2 | 50.6 | 2.5 | 2 |
| G016094 | 0.1 | 0.1 | 2 | 0.1 | 0.0 | 2 | 71.3 | 6.5 | 2 | 50.5 | 3.3 | 2 |
| G016095 | 0.0 | 0.0 | 2 | 0.6 | 0.1 | 2 | 70.5 | 5.4 | 2 | 51.6 | 5.0 | 2 |
| G016096 | 0.2 | 0.1 | 2 | 0.1 | 0.0 | 2 | 94.9 | 2.0 | 2 | 51.2 | 0.1 | 2 |
| G016097 | 0.1 | 0.1 | 2 | 0.3 | 0.0 | 2 | 39.7 | 12.4 | 2 | 50.9 | 4.5 | 2 |
| G016098 | 0.1 | 0.1 | 2 | 0.2 | 0.0 | 2 | 23.4 | 7.5 | 2 | 47.2 | 0.5 | 2 |
| G016099 | 0.1 | 0.0 | 2 | 0.2 | 0.0 | 2 | 84.7 | 5.8 | 2 | 63.2 | 2.5 | 2 |
| G016100 | 0.0 | 0.0 | 2 | 0.3 | 0.1 | 2 | 79.8 | 7.1 | 2 | 60.3 | 0.6 | 2 |
| G016101 | 0.1 | 0.1 | 2 | 0.6 | 0.1 | 2 | 2.3 | 0.8 | 2 | 38.8 | 1.5 | 2 |
| G016102 | 0.0 | 0.0 | 2 | 0.4 | 0.1 | 2 | 75.7 | 8.9 | 2 | 59.9 | 7.1 | 2 |
| G016103 | 0.2 | 0.1 | 2 | 0.6 | 0.1 | 2 | 76.8 | 4.7 | 2 | 46.9 | 3.4 | 2 |
| G016104 | 1.4 | 0.0 | 1 | 1.1 | 0.0 | 1 | 66.8 | 0.0 | 1 | 56.1 | 3.1 | 2 |
| G016105 | 0.1 | 0.1 | 2 | 0.7 | 0.3 | 2 | 90.7 | 5.1 | 2 | 58.0 | 3.0 | 2 |
| G016106 | 0.0 | 0.0 | 2 | 0.2 | 0.0 | 2 | 95.1 | 2.1 | 2 | 62.2 | 3.0 | 2 |
| G016107 | 0.1 | 0.1 | 2 | 0.2 | 0.0 | 2 | 84.9 | 2.6 | 2 | 59.5 | 1.1 | 2 |
| G016108 | 0.0 | 0.0 | 2 | 0.6 | 0.1 | 2 | 19.1 | 4.8 | 2 | 43.3 | 0.8 | 2 |
| G016109 | 0.0 | 0.0 | 2 | 0.1 | 0.0 | 2 | 86.5 | 3.3 | 2 | 62.9 | 3.5 | 2 |
| G016110 | 0.0 | 0.0 | 2 | 0.6 | 0.1 | 2 | 34.9 | 10.0 | 2 | 48.0 | 4.2 | 2 |
| G016111 | 65.6* | 3.7 | 2 | 1.4 | 0.1 | 2 | 32.9 | 3.7 | 2 | 44.5 | 1.3 | 2 |
| G016112 | 0.0 | 0.0 | 2 | 0.8 | 0.1 | 2 | 60.7 | 6.7 | 2 | 54.1 | 5.3 | 2 |
| G016113 | 1.1 | 0.4 | 2 | 0.2 | 0.0 | 2 | 84.2 | 6.7 | 2 | 60.5 | 5.2 | 2 |
| G016114 | 0.1 | 0.1 | 2 | 0.4 | 0.0 | 2 | 87.6 | 3.5 | 2 | 50.2 | 2.5 | 2 |
| G016115 | 0.0 | 0.0 | 2 | 0.3 | 0.1 | 2 | 69.3 | 7.4 | 2 | 52.8 | 4.8 | 2 |
| G016116 | 0.0 | 0.0 | 2 | 0.4 | 0.0 | 2 | 16.6 | 5.0 | 2 | 38.7 | 0.4 | 2 |
| G016117 | 0.0 | 0.0 | 2 | 0.4 | 0.1 | 2 | 85.6 | 4.9 | 2 | 49.0 | 3.0 | 2 |

*There is a naturally occurring C/T single nucleotide polymorphism for G016111 target sequence.

### Example 13—Dose Response and Multiplexed Editing

[0620] Three guides from Table 33, G016086, G016092, and G016067, were further characterized for editing efficacy with increasing amounts of guide and in combination with guides targeting TRAC (G013009, G016016, or G016017) and B32M (G015991, G015995, or G015996).

[0621] Cell preparation, activation, and electroporation were performed as described in Example 6 with the following deviations. Editing was performed using two miRNA species encoding BC22 (SEQ ID NO: 20) and UGI (SEQ ID NO:26) respectively. Editing was assessed at multiple concentrations of sgRNA, as indicated in Table 35 and Table 36. When multiple guides were used in a single reaction, each guide represented one quarter of the total guide concentration.

[0622] On day 10 post-editing, T cells were phenotyped by flow cytometry to determine MHC class II protein expression as described in Example 6. In addition, B32M detection was performed with B2M-FITC antibody (BioLegend, Cat. 316304) and CD3 expression was assayed using CD3-BV605 antibody (BioLegend, Cat. 317322).

[0623] DNA samples were subjected to PCR and subsequent NGS analysis, as described in Example 1. Table 35 provides MHC Class II negative flow cytometry results and NGS editing for cells edited with BC22 and individual guides targeting CIITA, with FIG. 24A graphing the percent C-to-T conversion and FIG. 243 graphing the percent MHC class II negative. Table 36 shows MHC Class II negative results for cells edited simultaneously with CIITA, B2M, and TRAC guides.

TABLE 35
Percent MHC-II negative cells and NGS outcomes following CIITA editing (n = 2)

| Guide Concentration | | 2 uM | | 1 uM | | 0.5 uM | | 0.25 uM | |
|---|---|---|---|---|---|---|---|---|---|
| Assay | Guide | Mean | SD | Mean | SD | Mean | SD | Mean | SD |
| MHC-II | G016086 | 80.2 | 12.0 | 72.2 | 19.7 | 60.5 | 14.3 | 49.7 | 16.1 |
| neg | G016092 | 64.5 | 11.4 | 59.3 | 11.8 | 49.0 | 5.7 | 42.6 | 15.1 |
| | G016067 | 77.3 | 4.4 | 76.8 | 2.1 | 64.5 | 6.3 | | |
| C-to-T | G016086 | 75.4 | 12.7 | 66.1 | 25.0 | 53.9 | 20.1 | 38.3 | 28.3 |
| | G016092 | 71.5 | 18.5 | 62.5 | 25.5 | 45.2 | 13.0 | 36.0 | 28.1 |
| | G016067 | 83.1 | 6.8 | 82.9 | 5.7 | 66.9 | 8.8 | 50.1 | 28.1 |
| C-to-A/G | G016086 | 1.8 | 0.1 | 1.6 | 0.1 | 1.7 | 0.1 | 1.1 | 0.6 |
| | G016092 | 1.6 | 0.1 | 1.3 | 0.2 | 1.2 | 0.0 | 1.2 | 0.5 |
| | G016067 | 1.0 | 0.3 | 1.2 | 0.1 | 1.5 | 0.5 | 0.9 | 0.5 |
| Indel | G016086 | 2.5 | 1.4 | 1.4 | 0.5 | 1.5 | 0.3 | 1.2 | 0.5 |
| | G016092 | 2.9 | 0.3 | 3.0 | 0.6 | 3.1 | 0.5 | 2.5 | 1.7 |
| | G016067 | 3.3 | 0.1 | 2.4 | 0.0 | 3.4 | 1.4 | 2.1 | 1.2 |

TABLE 36
Percent antigen negative cells following CIITA, TRAC, and
B2M editing

| | Concentration | | | | | | |
|---|---|---|---|---|---|---|---|
| | per guide: | 0.5 uM | | 0.25 uM | | 0.125 uM | |
| Assay | Guide | Mean | SD | Mean | SD | Mean | SD |
| Triple | G015995 G016086 | 62.1 | 9.3 | 51.9 | 9.4 | 26.1 | 13.6 |
| Neg | G016017 | | | | | | |
| | G015991 G016092 | 43.8 | 15.6 | 20.2 | 7.4 | 8.2 | 7.6 |
| | G016016 | | | | | | |
| | G015996 G016067 | 35.3 | 17.7 | 15.4 | 12.3 | 6.8 | 7.3 |
| | G013009 | | | | | | |
| MHC | G015995 G016086 | 67.0 | 8.0 | 57.6 | 7.8 | 38.6 | 5.4 |
| Class II | G016017 | | | | | | |
| Neg | G015991 G016092 | 57.2 | 8.2 | 45.2 | 3.2 | 36.8 | 5.3 |
| | G016016 | | | | | | |
| | G015996 G016067 | 53.1 | 7.9 | 69.1 | 43.1 | 41.3 | 7.1 |
| | G013009 | | | | | | |
| CD3 | G015995 G016086 | 92.5 | 2.3 | 90.5 | 3.2 | 77.3 | 15.1 |
| Neg | G016017 | | | | | | |
| | G015991 G016092 | 88.1 | 6.2 | 87.6 | 3.2 | 74.2 | 14.0 |
| | G016016 | | | | | | |
| | G015996 G016067 | 92.8 | 2.0 | 89.5 | 4.8 | 79.3 | 14.4 |
| | G013009 | | | | | | |
| B2M | G015995 G016086 | 94.9 | 2.5 | 90.0 | 6.4 | 63.2 | 28.0 |
| Neg | G016017 | | | | | | |
| | G015991 G016092 | 73.4 | 19.2 | 29.1 | 13.1 | 14.3 | 15.2 |
| | G016016 | | | | | | |
| | G015996 G016067 | 60.8 | 25.7 | 29.1 | 21.4 | 14.3 | 15.0 |
| | G013009 | | | | | | |

### Example 14. Screening of TRAC Guide RNAs

[0624] TRAC gRNAs were screened for efficacy in T cells by assessing knockdown of CD3 surface expression using both Cas9 with UGI in trans and BC22 with UGI in trans. The percentage of T cells negative for CD3 protein and the percentage of editing at the TRAC locus was assayed following TRAC editing by electroporation with mRNA and gRNA.

### Example 14.1. T Cell Preparation

[0625] T cells were prepared from a leukopak using the EasySep Human T cell Isolation Kit (Stem Cell Technology, Cat. 17951) following the manufacturers protocol. T cells were cryopreserved in Cryostor CS10 freezing media (Cat. 07930) for future use. Upon thaw, T cells were plated at a density of 1.0×10\hat{ }6 cells/mL in T cell R10 media composed of RPMI 1640 (Corning, Cat. 10-040-CV) containing 10% (v/v) of fetal bovine serum, 2 mM Glutamax (Gibco, Cat. 35050-061), 22 μM of 2-Mercaptoethanol, 100 uM non-essential amino acids (Corning, Cat. 25-025-Cl), 1 mM sodium pyruvate, 10 mM HEPES buffer, 1% of Penicillin-Streptomycin, plus 100 U/mL of recombinant human interleukin-2 (Peprotech, Cat. 200-02). T cells were activated with Dynabeads® Human T-Activator CD3/CD28 (Gibco, Cat. 11141D). Cells were expanded in T cell media for 72 hours prior to mRNA transfection.

### Example 14.2. T Cell Editing with RNA Electroporation

[0626] Solutions containing mRNA encoding Cas9 protein (SEQ ID NO: 8), BC22 (SEQ ID NO: 20) or UGI (SEQ ID NO 26) were prepared in sterile water. 50 μM TRAC targeting sgRNAs were removed from their storage plates and denatured for 2 minutes at 95° C. before cooling on ice. Seventy-two hours post activation, T cells were harvested, centrifuged, and resuspended at a concentration of 12.5×10\hat{ }6 T cells/mL in P3 electroporation buffer (Lonza). For each well to be electroporated, 1×10\hat{ }5 T cells were mixed with 200 ng of editor mRNA, 200 ng of UGI mRNA and 20 pmols of sgRNA as described in Table 37 in a final volume of 20 uL of P3 electroporation buffer. This mix was transferred in triplicate to a 96-well Nucleofector™ plate and electroporated using the manufacturer's pulse code. Electroporated T cells were rested in 180 ul of R10 media plus 100 U/mL of recombinant human interleukin-2 before being transferred to a new flat-bottom 96-well plate. The resulting plate was incubated at 37° C. for 6 days. On day 9 post-editing cells were collected for flow cytometry analysis and NGS sequencing.

### Example 14.3. Flow Cytometry and NGS Sequencing

[0627] On day 9 post-editing, T cells were phenotyped by flow cytometry to determine CD3 protein expression as described in Example 6 using antibodies targeting CD3 (BioLegend® Cat. No. 317322) and Isotype Control-PE (BioLegend® Cat. No. 400269). DNA samples were subjected to PCR and subsequent NGS analysis, as described in Example 1. The mean percentage of each editing type at the TRAC locus and the mean number of CD3 negative cells after editing with BC22 and UGI are showing in Table 37; results after editing with Cas9 and UGI are shown in Table 38. C-to-T editing purity is calculated as the percentage of edited reads containing only C-to-T conversions.

TABLE 37
Percent editing and percent of CD3 negative cells following TRAC editing with
BC22 and UGI

| | | | | | | | % C to T | | | | | |
|---|---|---|---|---|---|---|---|---|---|---|---|---|
| | % C to T | | % A to G | | % Indel | | purity | | | % CD3 negative | | |
| Guide | Mean | SD | Mean | SD | Mean | SD | Mean | SD | n | Mean | SD | n |
| G012086 | 95.21 | 0.42 | 2.46 | 0.16 | 1.24 | 0.04 | 96.26 | 0.12 | 3 | 1.22 | 0.55 | 3 |
| G013004 | 74.7 | 14.43 | 1.6 | 0.32 | 3.25 | 1.05 | 93.97 | 0.52 | 3 | 17.17 | 7.69 | 3 |
| G013005 | 89.47 | 0.6 | 3.24 | 0.11 | 4.04 | 0.49 | 92.48 | 0.53 | 3 | 8.52 | 1.59 | 3 |
| G013006 | 90.56 | 3.87 | 2.82 | 0.23 | 1.74 | 0.15 | 95.21 | 0.16 | 3 | 2.77 | 0.34 | 3 |
| G013007 | 90.96 | 3.68 | 3.05 | 0.37 | 1.51 | 0.35 | 95.21 | 0.37 | 3 | 3.07 | 1.2 | 3 |
| G013008 | 67.48 | 24.46 | 2.15 | 0.67 | 1.07 | 0.51 | 95.45 | 0.64 | 3 | 1.2 | 0.38 | 3 |
| G013009 | 90.05 | 4.17 | 2.29 | 0.27 | 2.09 | 0.17 | 95.36 | 0.36 | 3 | 87.87 | 5.02 | 3 |
| G014831 | 92.48 | 1.55 | 2.26 | 0.22 | 2.93 | 0.25 | 94.68 | 0.54 | 3 | 50.5 | 3.25 | 3 |
| G015997 | 86.72 | 9.45 | 1.34 | 0.09 | 1.18 | 0.21 | 97.14 | 0.50 | 3 | 2.45 | 0.75 | 3 |
| G015998 | 79.5 | 15.18 | 2.12 | 0.63 | 0.98 | 0.12 | 96.25 | 0.13 | 3 | 2.8 | 1.35 | 3 |
| G015999 | 87.16 | 1.81 | 3.57 | 0.03 | 5.8 | 0.77 | 90.30 | 0.57 | 3 | 14.16 | 6.97 | 3 |
| G016000 | 74.27 | 15.17 | 2.79 | 0.16 | 1.6 | 0.16 | 94.24 | 1.47 | 3 | 6.64 | 0.97 | 3 |
| G016001 | 96.49 | 1.69 | 0.88 | 0.14 | 0.42 | 0.06 | 98.67 | 0.22 | 3 | 15.93 | 3.4 | 3 |
| G016002 | 96.11 | 0.65 | 1.18 | 0.1 | 0.87 | 0.07 | 97.90 | 0.09 | 3 | 4.18 | 2.8 | 3 |
| G016003 | 84.79 | 6.22 | 1.04 | 0.06 | 7.1 | 1.92 | 91.24 | 1.99 | 3 | 2.17 | 1.04 | 3 |
| G016004 | 91.78 | 3.75 | 2.16 | 0.18 | 0.95 | 0.23 | 96.72 | 0.36 | 3 | 1.53 | 0.28 | 3 |
| G016005 | 91.02 | 3.02 | 2.16 | 0.08 | 3.06 | 0.13 | 94.58 | 0.11 | 3 | 15.37 | 2.72 | 3 |
| G016006 | 92.18 | 1.4 | 1.91 | 0.09 | 2.97 | 0.05 | 94.98 | 0.09 | 3 | 22.03 | 0.9 | 3 |
| G016007 | 96.71 | 0.32 | 1.14 | 0.12 | 1.05 | 0.2 | 97.78 | 0.22 | 3 | 5.78 | 0.2 | 3 |
| G016008 | 95.81 | 0.94 | 1.29 | 0.07 | 1.33 | 0.2 | 97.34 | 0.16 | 3 | 36.67 | 0.45 | 3 |
| G016009 | 38.69 | 13.44 | 2.08 | 0.22 | 0.4 | 0.17 | 93.73 | 1.11 | 3 | 0.79 | 0.2 | 3 |
| G016010 | 91.39 | 0.55 | 2.22 | 0.06 | 5.02 | 0.43 | 92.67 | 0.47 | 3 | 9.21 | 0.44 | 3 |
| G016011 | 94.67 | 0.78 | 2.26 | 0.11 | 1.04 | 0.1 | 96.63 | 0.16 | 3 | 0.32 | 0.06 | 3 |
| G016012 | 87.92 | 1.23 | 2 | 0.17 | 7.99 | 1.51 | 89.80 | 1.36 | 3 | 10.11 | 0.54 | 3 |
| G016013 | 91.68 | 3.86 | 1.77 | 0.06 | 2.45 | 0.28 | 95.59 | 0.43 | 3 | 59.4 | 4.51 | 3 |
| G016014 | 90.7 | 6.53 | 1.6 | 0.02 | 1.44 | 0.26 | 96.75 | 0.30 | 3 | 6.21 | 2.09 | 3 |
| G016015 | 93.07 | 2.04 | 2.84 | 0.16 | 1.2 | 0.23 | 95.83 | 0.41 | 3 | 0.88 | 0.67 | 3 |
| G016016 | 94.2 | 0.99 | 2.11 | 0.11 | 0.96 | 0.18 | 96.84 | 0.28 | 3 | 90.8 | 1.59 | 3 |
| G016017 | 95.51 | 0.63 | 1.86 | 0.1 | 1.04 | 0.17 | 97.05 | 0.25 | 3 | 91.1 | 1.35 | 3 |
| G016018 | 94.5 | 1.03 | 1.48 | 0.16 | 1.61 | 0.24 | 96.83 | 0.34 | 3 | 6.02 | 1.95 | 3 |
| G016019 | 71.54 | 5.93 | 4.69 | 0.23 | 3.03 | 0.53 | 90.27 | 0.14 | 2 | 78.13 | 9.8 | 3 |
| G016020 | 29.14 | 9.23 | 1.64 | 0.35 | 0.44 | 0.18 | 93.23 | 0.87 | 3 | 1.56 | 0.8 | 3 |
| G016021 | 32.46 | 10.32 | 2.07 | 0.54 | 1.42 | 0.21 | 90.09 | 0.99 | 3 | 0.65 | 0.13 | 3 |
| G016022 | 89.76 | 4.52 | 1.98 | 0.03 | 2.74 | 0.16 | 95.00 | 0.11 | 3 | 15.97 | 6.07 | 3 |
| G016023 | 47.93 | 14.11 | 2.17 | 0.64 | 1.72 | 0.39 | 92.48 | 0.21 | 2 | 5.12 | 2.45 | 3 |
| G016024 | 91.23 | 3.82 | 1.77 | 0.27 | 2.48 | 0.28 | 95.55 | 0.37 | 3 | 3.56 | 2.12 | 3 |
| G016025 | 59.93 | 18.15 | 1.18 | 0.3 | 0.71 | 0.06 | 96.86 | 0.40 | 3 | 1.86 | 0.37 | 3 |
| G016026 | 93.52 | 3.27 | 1.45 | 0.29 | 0.8 | 0.09 | 97.65 | 0.29 | 3 | 82.27 | 3.13 | 3 |
| G016027 | 92.7 | 1.71 | 1.67 | 0.04 | 3.09 | 0.19 | 95.12 | 0.16 | 3 | 5.05 | 4.02 | 3 |
| G016028 | 84.88 | 9.36 | 1.29 | 0.11 | 0.88 | 0.05 | 97.49 | 0.29 | 3 | 2.01 | 1.07 | 3 |
| G016029 | 51.08 | 14.8 | 1.57 | 0.37 | 0.8 | 0.08 | 95.48 | 0.50 | 3 | 1.29 | 1.14 | 3 |

TABLE 38
Percent editing and percent of CD3 negative cells following TRAC editing with
Cas9

| | % C to T | | | % A to G | | | % Indel | | | % CD3 negative | | |
|---|---|---|---|---|---|---|---|---|---|---|---|---|
| Guide | Mean | SD | n | Mean | SD | n | Mean | SD | n | Mean | SD | n |
| G012086 | 0.01 | 0.01 | 3 | 0.10 | 0.02 | 3 | 98.18 | 0.28 | 3 | 94.87 | 0.25 | 3 |
| G013004 | 0.05 | 0.01 | 3 | 0.17 | 0.08 | 3 | 64.90 | 20.08 | 3 | 61.17 | 19.91 | 3 |
| G013005 | 0.03 | 0.00 | 3 | 0.05 | 0.01 | 3 | 94.14 | 1.85 | 3 | 83.43 | 2.05 | 3 |
| G013006 | 0.04 | 0.03 | 3 | 0.11 | 0.07 | 3 | 96.29 | 2.22 | 3 | 92.90 | 1.32 | 3 |
| G013007 | 0.05 | 0.01 | 3 | 0.11 | 0.02 | 3 | 96.13 | 1.88 | 3 | 92.93 | 1.69 | 3 |
| G013008 | 0.04 | 0.01 | 3 | 0.23 | 0.11 | 3 | 83.46 | 9.24 | 3 | 79.53 | 7.89 | 3 |
| G013009 | 0.19 | 0.05 | 3 | 0.20 | 0.02 | 3 | 94.74 | 2.23 | 3 | 80.87 | 1.65 | 3 |
| G014831 | 0.02 | 0.02 | 3 | 0.07 | 0.02 | 3 | 99.13 | 0.19 | 3 | 94.87 | 0.21 | 3 |
| G015997 | 0.19 | 0.07 | 3 | 0.16 | 0.01 | 3 | 90.71 | 4.41 | 3 | 88.77 | 3.65 | 3 |
| G015998 | 0.22 | 0.06 | 3 | 0.15 | 0.04 | 3 | 93.52 | 4.46 | 3 | 80.93 | 1.07 | 3 |
| G015999 | 0.02 | 0.02 | 3 | 0.01 | 0.01 | 3 | 98.15 | 0.89 | 3 | 87.00 | 0.78 | 3 |
| G016000 | 0.05 | 0.03 | 3 | 0.08 | 0.01 | 3 | 97.63 | 0.90 | 3 | 92.87 | 0.93 | 3 |
| G016001 | 0.01 | 0.01 | 3 | 0.01 | 0.01 | 3 | 95.81 | 1.95 | 3 | 83.63 | 1.05 | 3 |
| G016002 | 0.02 | 0.02 | 3 | 0.08 | 0.07 | 3 | 97.47 | 0.51 | 3 | 32.97 | 3.19 | 3 |
| G016003 | 0.17 | 0.08 | 3 | 0.08 | 0.03 | 3 | 95.15 | 3.25 | 3 | 70.80 | 2.09 | 3 |
| G016004 | 0.06 | 0.06 | 3 | 0.13 | 0.07 | 3 | 97.56 | 0.99 | 3 | 93.83 | 0.81 | 3 |
| G016005 | 0.22 | 0.07 | 3 | 0.21 | 0.07 | 3 | 98.75 | 0.01 | 3 | 87.40 | 1.47 | 3 |
| G016006 | 0.03 | 0.03 | 3 | 0.14 | 0.06 | 3 | 97.76 | 0.66 | 3 | 94.93 | 0.47 | 3 |
| G016007 | 0.09 | 0.04 | 3 | 0.06 | 0.03 | 3 | 98.40 | 0.46 | 3 | 94.73 | 0.40 | 3 |
| G016008 | 0.00 | 0.01 | 3 | 0.01 | 0.01 | 3 | 98.92 | 0.35 | 3 | 94.67 | 0.55 | 3 |
| G016009 | 0.19 | 0.05 | 3 | 0.77 | 0.11 | 3 | 13.55 | 3.43 | 3 | 68.13 | 3.92 | 3 |
| G016010 | 0.02 | 0.00 | 3 | 0.19 | 0.04 | 3 | 98.20 | 0.40 | 3 | 93.63 | 0.21 | 3 |
| G016011 | 0.06 | 0.02 | 3 | 0.18 | 0.03 | 3 | 97.57 | 0.73 | 3 | 93.03 | 63.50 | 3 |
| G016012 | 0.04 | 0.02 | 3 | 0.12 | 0.05 | 3 | 97.37 | 0.15 | 3 | 93.87 | 0.76 | 3 |
| G016013 | 0.03 | 0.04 | 3 | 0.05 | 0.00 | 3 | 97.49 | 1.15 | 3 | 82.40 | 2.11 | 3 |
| G016014 | 0.00 | 0.00 | 3 | 0.04 | 0.06 | 3 | 98.15 | 1.00 | 3 | 92.43 | 0.90 | 3 |
| G016015 | 0.07 | 0.05 | 3 | 0.19 | 0.03 | 3 | 98.09 | 0.20 | 3 | 94.03 | 0.29 | 3 |
| G016016 | 0.01 | 0.01 | 3 | 0.05 | 0.01 | 3 | 97.03 | 0.81 | 3 | 84.17 | 0.29 | 3 |
| G016017 | 0.03 | 0.03 | 3 | 0.05 | 0.01 | 3 | 97.64 | 0.43 | 3 | 77.80 | 4.97 | 3 |
| G016018 | 0.05 | 0.03 | 3 | 0.03 | 0.01 | 3 | 98.44 | 0.32 | 3 | 61.57 | 6.82 | 3 |
| G016019 | 0.01 | 0.00 | 3 | 0.06 | 0.02 | 3 | 88.15 | 5.31 | 3 | 31.43 | 5.54 | 3 |
| G016020 | 0.03 | 0.02 | 3 | 0.10 | 0.03 | 3 | 79.18 | 7.16 | 3 | 93.30 | 1.28 | 3 |
| G016021 | 0.03 | 0.01 | 3 | 0.23 | 0.04 | 3 | 42.54 | 6.06 | 3 | 70.13 | 8.45 | 3 |
| G016022 | 0.00 | 0.00 | 3 | 0.01 | 0.01 | 3 | 98.01 | 1.02 | 3 | 94.23 | 0.72 | 3 |
| G016023 | 0.07 | 0.03 | 3 | 0.54 | 0.10 | 3 | 88.15 | 7.96 | 3 | 51.13 | 15.47 | 3 |
| G016024 | 0.02 | 0.02 | 3 | 0.24 | 0.13 | 3 | 98.29 | 0.54 | 3 | 76.57 | 2.92 | 3 |
| G016025 | 0.15 | 0.02 | 3 | 0.24 | 0.04 | 3 | 58.36 | 15.14 | 3 | 62.27 | 3.41 | 3 |
| G016026 | 0.00 | 0.01 | 3 | 0.03 | 0.01 | 3 | 95.34 | 1.69 | 3 | 65.37 | 10.10 | 3 |
| G016027 | 0.08 | 0.01 | 3 | 0.27 | 0.14 | 3 | 92.27 | 3.82 | 3 | 15.07 | 5.42 | 3 |
| G016028 | 0.07 | 0.06 | 3 | 0.16 | 0.05 | 3 | 73.05 | 9.53 | 3 | 90.10 | 0.28 | 2 |
| G016029 | 0.09 | 0.01 | 3 | 0.51 | 0.04 | 3 | 19.24 | 5.53 | 3 | 95.00 | 0.28 | 2 |

### Example 15. Screening of TRBC Guide RNAs

[0628] TRBC gRNAs were screened for efficacy in T cells by assessing knockdown of CD3 surface expression using both Cas9 with UGI in trans and BC22 with UGI in trans. The percentage of T cells negative for CD3 protein and the percentage of editing of each type at the TRBC1 locus was assayed following TRBC editing by electroporation with mRNA and gRNA.

### Example 15.1. T Cell Preparation

[0629] T cells were prepared from a leukopak using the EasySep Human T cell Isolation Kit (Stem Cell Technology, Cat. 17951) following the manufacturers protocol. T cells were cryopreserved in Cryostor CS10 freezing media (Cat. 07930) for future use. Upon thaw, T cells were plated at a density of 1.0×10\hat{ }6 cells/mL in T cell R10 media composed of RPMI 1640 (Corning, Cat. 10-040-CV) containing 10% (v/v) of fetal bovine serum, 2 mM Glutamax (Gibco, Cat. 35050-061), 22 μM of 2-Mercaptoethanol, 100 uM non-essential amino acids (Corning, Cat. 25-025-Cl), 1 mM sodium pyruvate, 10 mM HEPES buffer, 1% of Penicillin-Streptomycin, plus 100 U/mL of recombinant human interleukin-2 (Peprotech, Cat. 200-02). T cells were activated with Dynabeads® Human T-Activator CD3/CD28 (Gibco, Cat. 11141D). Cells were expanded in T cell media for 72 hours prior to mRNA transfection.

### Example 15.2. T Cell Editing with RNA Electroporation

[0630] Solutions containing mRNA encoding Cas9 protein (SEQ ID NO: 8), BC22 (SEQ ID NO: 20) or UGI (SEQ ID NO 26) were prepared in sterile water. 50 μM TRBC targeting sgRNAs were removed from their storage plates and denatured for 2 minutes at 95° C. before cooling on ice. Seventy-two hours post activation, T cells were harvested, centrifuged, and resuspended at a concentration of 12.5×10\hat{ }6 T cells/mL in P3 electroporation buffer (Lonza). For each well to be electroporated, 1×10\hat{ }5 T cells were mixed with 200 ng of editor mRNA, 200 ng of UGI mRNA and 20 pmols of sgRNA as described in Table 39 in a final volume of 20 uL of P3 electroporation buffer. This mix was transferred in triplicate to a 96-well Nucleofector™ plate and electroporated using the manufacturer's pulse code. Electroporated T cells were rested in 180 ul of R10 media plus 100 U/mL of recombinant human interleukin-2 before being transferred to a new flat-bottom 96-well plate. The resulting plate was incubated at 37° C. for 6 days. On day 9 post-editing cells were collected for flow cytometry analysis and NGS sequencing.

### Example 15.3. Flow Cytometry and NGS Sequencing

[0631] On day 9 post-editing, T cells were phenotyped by flow cytometry to determine CD3 protein expression as described in Example 6 using antibodies targeting CD3 (BioLegend® Cat. No. 317322) and Isotype Control-PE (BioLegend® Cat. No. 400269). DNA samples were subjected to PCR and subsequent NGS analysis, as described in Example 1. The mean percentage of each editing type at the TRAC locus and the mean number of CD3 negative cells after editing with BC22 and UGI are showing in Table 39; results after editing with Cas9 and UGI are shown in Table 40. C-to-T editing purity is calculated as the percentage of edited reads containing only C-to-T conversions.

TABLE 39
Percent editing and percent of CD3 negative cells following TRBC editing
with BC22

| | | | | | | | % C to T | | | | | |
|---|---|---|---|---|---|---|---|---|---|---|---|---|
| | % C to T | | % A to G | | % Indel | | purity | | | % CD3 negative | | |
| Guide | Mean | SD | Mean | SD | Mean | SD | Mean | SD | n | Mean | SD | N |
| G013015 | 93.67 | 0.06 | 3.16 | 0.19 | 2.46 | 0.19 | 94.34 | 0.00 | 2 | 32.55 | 1.77 | 2 |
| G014832 | 90.99 | 0.09 | 3.08 | 0.24 | 3.66 | 0.49 | 93.10 | 0.23 | 2 | 13.80 | 0.85 | 2 |
| G016167 | 88.56 | 0.62 | 5.06 | 0.26 | 5.76 | 0.47 | 89.11 | 0.72 | 2 | 30.25 | 7.28 | 2 |
| G016168 | 93.21 | 0.42 | 2.12 | 0.09 | 4.19 | 0.09 | 93.67 | 0.20 | 2 | 35.75 | 0.07 | 2 |
| G016171 | 92.69 | 0.50 | 3.59 | 0.15 | 3.09 | 0.33 | 93.28 | 0.48 | 2 | 57.90 | 0.28 | 2 |
| G016172 | 81.81 | 1.17 | 5.54 | 0.28 | 10.17 | 1.74 | 83.90 | 1.93 | 2 | 50.70 | 2.83 | 2 |
| G016174 | 92.42 | 1.66 | 0.99 | 0.09 | 4.74 | 0.19 | 94.17 | 0.20 | 2 | 92.75 | 0.78 | 2 |
| G016177 | 96.72 | 0.07 | 0.91 | 0.05 | 1.64 | 0.18 | 97.43 | 0.13 | 2 | 21.10 | 4.67 | 2 |
| G016179 | 82.05 | 1.68 | 6.67 | 0.28 | 9.58 | 0.83 | 83.46 | 1.22 | 2 | 40.00 | 2.12 | 2 |
| G016180 | 94.32 | 0.31 | 1.46 | 0.22 | 1.06 | 0.23 | 97.39 | 0.01 | 2 | 91.70 | 0.71 | 2 |
| G016181 | 92.19 | 0.51 | 3.77 | 0.30 | 2.04 | 0.14 | 94.07 | 0.18 | 2 | 19.20 | 1.27 | 2 |
| G016183 | 92.38 | 0.73 | 2.99 | 0.31 | 3.42 | 0.43 | 93.51 | 0.75 | 2 | 24.60 | 0.85 | 2 |
| G016187 | 92.08 | 2.19 | 3.14 | 0.33 | 1.88 | 0.47 | 94.82 | 0.90 | 2 | 13.90 | 0.85 | 2 |
| G016188 | 79.29 | 2.46 | 2.78 | 0.00 | 3.06 | 0.15 | 93.14 | 0.03 | 2 | 90.00 | 0.57 | 2 |
| G016189 | 93.26 | 0.49 | 2.79 | 0.19 | 2.76 | 0.45 | 94.38 | 0.64 | 2 | 92.05 | 0.64 | 2 |
| G016190 | 87.95 | 0.88 | 2.56 | 0.19 | 3.41 | 0.14 | 93.64 | 0.11 | 2 | 5.44 | 0.35 | 2 |
| G016191 | 51.28 | 4.28 | 2.37 | 0.21 | 2.65 | 0.05 | 91.06 | 0.41 | 2 | 3.88 | 0.59 | 2 |
| G016192 | 90.50 | 1.28 | 3.62 | 0.10 | 5.08 | 1.13 | 91.23 | 1.24 | 2 | 14.10 | 2.26 | 2 |
| G016193 | 88.60 | 0.69 | 3.61 | 0.10 | 4.95 | 0.05 | 91.19 | 0.11 | 2 | 8.06 | 0.46 | 2 |
| G016194 | 88.95 | 0.62 | 0.67 | 0.02 | 4.55 | 0.47 | 94.45 | 0.49 | 2 | 19.70 | 4.81 | 2 |
| G016195 | 91.17 | 0.74 | 2.57 | 0.15 | 3.19 | 0.23 | 94.05 | 0.04 | 2 | 13.65 | 1.91 | 2 |
| G016196 | 91.58 | 0.80 | 2.16 | 0.32 | 5.05 | 0.11 | 92.70 | 0.46 | 2 | 18.25 | 0.78 | 2 |
| G016197 | 89.55 | 0.90 | 2.72 | 0.17 | 6.99 | 0.68 | 90.22 | 0.87 | 2 | 16.25 | 7.71 | 2 |
| G016199 | 91.01 | 1.34 | 4.05 | 0.15 | 3.10 | 0.53 | 92.71 | 0.75 | 2 | 93.75 | 0.21 | 2 |
| G016200 | 94.68 | 0.86 | 2.09 | 0.34 | 2.68 | 0.60 | 95.20 | 0.95 | 2 | 93.95 | 0.07 | 2 |
| G016201 | 89.27 | 0.55 | 5.04 | 0.63 | 4.80 | 0.14 | 90.07 | 0.76 | 2 | 19.40 | 2.97 | 2 |
| G016203 | 79.59 | 1.09 | 3.78 | 0.55 | 9.40 | 0.25 | 85.80 | 0.57 | 2 | 12.95 | 0.49 | 2 |
| G016204 | 93.89 | 0.26 | 3.36 | 0.07 | 2.06 | 0.08 | 94.54 | 0.01 | 2 | 42.85 | 1.06 | 2 |
| G016205 | 67.12 | 3.18 | 3.84 | 0.00 | 5.66 | 0.09 | 87.59 | 0.62 | 2 | 41.35 | 1.48 | 2 |
| G016206 | 92.29 | 0.93 | 2.63 | 0.42 | 1.65 | 0.12 | 95.56 | 0.34 | 2 | 93.00 | 0.28 | 2 |
| G016207 | 85.70 | 2.33 | 5.16 | 0.32 | 8.56 | 2.71 | 86.20 | 2.39 | 2 | 44.60 | 0.71 | 2 |
| G016211 | 84.04 | 2.44 | 1.20 | 0.09 | 2.92 | 0.02 | 95.32 | 0.06 | 2 | 67.50 | 3.96 | 2 |
| G016212 | 95.39 | 0.87 | 0.78 | 0.11 | 2.11 | 0.44 | 97.05 | 0.58 | 2 | 48.30 | 0.00 | 2 |
| G016214 | 88.50 | 3.77 | 2.03 | 0.05 | 1.53 | 0.38 | 96.12 | 0.51 | 2 | 83.75 | 3.75 | 2 |
| G016216 | 91.37 | 0.45 | 3.67 | 0.40 | 4.65 | 0.84 | 91.65 | 0.44 | 2 | 60.65 | 0.92 | 2 |
| G016217 | 90.89 | 0.05 | 3.59 | 0.01 | 5.13 | 0.04 | 91.25 | 0.05 | 2 | 35.75 | 3.46 | 2 |
| G016219 | 89.15 | 1.07 | 3.93 | 0.16 | 5.59 | 0.64 | 90.35 | 0.83 | 2 | 47.85 | 2.33 | 2 |
| G016222 | 82.02 | 0.15 | 4.25 | 0.09 | 12.30 | 0.07 | 83.21 | 0.05 | 2 | 22.55 | 0.35 | 2 |
| G016227 | 67.64 | 0.78 | 4.66 | 0.28 | 14.36 | 0.70 | 78.05 | 0.57 | 2 | 38.20 | 1.27 | 2 |
| G016228 | 93.12 | 1.35 | 4.09 | 0.32 | 1.11 | 0.13 | 94.71 | 0.11 | 2 | 14.30 | 0.99 | 2 |
| G016230 | 88.34 | 1.74 | 3.06 | 0.11 | 5.98 | 1.48 | 90.71 | 1.45 | 2 | 13.25 | 2.76 | 2 |
| G016232 | 71.60 | n/a | 6.32 | n/a | 21.40 | n/a | 72.09 | n/a | 1 | 39.80 | 0.71 | 2 |
| G016233 | 87.08 | 1.67 | 2.87 | 0.18 | 8.87 | 2.03 | 88.13 | 1.86 | 2 | 22.20 | 8.91 | 2 |
| G016238 | 90.49 | 1.00 | 2.74 | 0.20 | 4.68 | 0.22 | 92.41 | 0.10 | 2 | 25.10 | 6.79 | 2 |
| G016239 | 87.37 | 0.96 | 5.11 | 0.06 | 7.02 | 1.07 | 87.81 | 1.01 | 2 | 29.95 | 1.63 | 2 |
| G016240 | 76.58 | 1.58 | 3.86 | 0.23 | 16.03 | 0.07 | 79.39 | 0.21 | 2 | 55.55 | 3.32 | 2 |
| G016241 | 69.44 | 1.35 | 3.89 | 0.04 | 24.19 | 1.07 | 71.21 | 1.21 | 2 | 61.50 | 1.84 | 2 |
| G016242 | 91.60 | 0.84 | 2.92 | 0.06 | 4.83 | 0.56 | 92.20 | 0.64 | 2 | 3.37 | 0.28 | 2 |
| G016243 | 93.32 | 2.21 | 2.74 | 0.02 | 1.69 | 0.36 | 95.46 | 0.48 | 2 | 33.75 | 5.16 | 2 |
| G016245 | 81.87 | 0.70 | 6.03 | 0.31 | 8.96 | 0.11 | 84.52 | 0.28 | 2 | 40.00 | 2.40 | 2 |
| G016248 | 81.23 | 2.35 | 1.14 | 0.04 | 2.95 | 0.34 | 95.21 | 0.20 | 2 | 5.33 | 0.21 | 2 |
| G016249 | No data | | | | | | | | | 6.87 | 2.02 | 2 |
| G016250 | No data | | | | | | | | | 12.50 | 2.12 | 2 |
| G016251 | 92.57 | 0.21 | 2.66 | 0.37 | 4.40 | 0.21 | 92.91 | 0.16 | 2 | 31.45 | 1.48 | 2 |
| G016252 | 84.54 | 0.88 | 1.23 | 0.06 | 1.93 | 0.03 | 96.40 | 0.14 | 2 | 2.47 | 0.17 | 2 |
| G016253 | 93.22 | 0.40 | 1.19 | 0.00 | 2.83 | 0.38 | 95.86 | 0.35 | 2 | 28.55 | 0.21 | 2 |
| G016254 | 92.52 | 0.86 | 2.96 | 0.16 | 3.53 | 0.57 | 93.45 | 0.75 | 2 | 2.02 | 0.44 | 2 |
| G016255 | 75.91 | 0.26 | 3.64 | 0.06 | 18.80 | 0.10 | 77.19 | 0.06 | 2 | 21.70 | 0.42 | 2 |
| G016256 | 69.87 | 5.75 | 3.53 | 0.29 | 1.87 | 0.48 | 92.82 | 0.31 | 2 | 6.39 | 2.44 | 2 |
| G016257 | 90.90 | 0.20 | 2.36 | 0.05 | 5.81 | 0.08 | 91.75 | 0.05 | 2 | 5.01 | 0.46 | 2 |
| G016258 | 69.09 | 1.72 | 3.05 | 0.31 | 24.53 | 0.99 | 71.46 | 1.01 | 2 | 26.90 | 0.71 | 2 |
| G016259 | 88.91 | 1.19 | 1.99 | 0.29 | 5.58 | 0.45 | 92.15 | 0.81 | 2 | 8.44 | 0.88 | 2 |
| G016260 | 92.85 | 1.13 | 1.82 | 0.27 | 2.58 | 0.11 | 95.48 | 0.42 | 2 | 4.30 | 0.07 | 2 |
| G016261 | 92.78 | 1.36 | 0.94 | 0.43 | 4.51 | 0.44 | 94.45 | 0.91 | 2 | 16.55 | 1.34 | 2 |
| G016262 | 95.60 | 0.22 | 1.36 | 0.03 | 2.59 | 0.37 | 96.03 | 0.34 | 2 | 4.29 | 0.81 | 2 |
| G016263 | No data | | | | | | | | | 78.40 | 0.14 | 2 |
| G016264 | 87.24 | 0.43 | 1.60 | 0.02 | 5.83 | 0.44 | 92.15 | 0.49 | 2 | 21.90 | 0.42 | 2 |
| G016265 | 48.92 | 6.40 | 2.49 | 0.13 | 1.49 | 0.07 | 92.41 | 0.81 | 2 | 2.53 | 0.22 | 2 |
| G016266 | 72.19 | 0.15 | 6.56 | 0.20 | 20.76 | 0.17 | 72.55 | 0.02 | 2 | 18.90 | 3.68 | 2 |
| G016267 | 92.15 | 0.40 | 4.24 | 0.38 | 2.94 | 0.26 | 92.78 | 0.14 | 2 | 16.65 | 8.70 | 2 |
| G016268 | 93.60 | 0.39 | 3.72 | 0.25 | 2.43 | 0.04 | 93.83 | 0.29 | 2 | 3.03 | 0.24 | 2 |
| G016269 | 48.11 | 0.16 | 4.00 | 0.55 | 2.93 | 0.20 | 87.42 | 1.23 | 2 | 17.05 | 1.63 | 2 |
| G016270 | 87.48 | 0.28 | 2.81 | 0.16 | 9.04 | 0.32 | 88.06 | 0.46 | 2 | 66.90 | 0.57 | 2 |
| G016271 | 91.19 | 1.41 | 4.00 | 0.08 | 3.94 | 1.08 | 91.99 | 1.19 | 2 | 14.50 | 10.33 | 2 |
| G016272 | 93.90 | 0.09 | 1.39 | 0.12 | 4.07 | 0.23 | 94.50 | 0.11 | 2 | 27.20 | 1.56 | 2 |
| G016273 | 87.75 | 0.20 | 5.66 | 0.09 | 5.36 | 0.36 | 88.84 | 0.26 | 2 | 31.50 | 3.25 | 2 |
| G016274 | 83.68 | 1.26 | 4.02 | 0.19 | 7.12 | 0.27 | 88.24 | 0.59 | 2 | 17.50 | 6.93 | 2 |
| G016275 | 93.35 | 0.24 | 3.14 | 0.20 | 2.52 | 0.19 | 94.28 | 0.00 | 2 | 14.65 | 9.26 | 2 |
| G016276 | 94.95 | 0.27 | 1.98 | 0.04 | 2.65 | 0.21 | 95.35 | 0.26 | 2 | 30.35 | 1.48 | 2 |
| G016277 | 90.15 | 1.29 | 5.09 | 0.18 | 1.82 | 0.65 | 92.89 | 0.54 | 2 | 16.13 | 13.68 | 2 |
| G016278 | 83.20 | 3.62 | 5.41 | 0.96 | 2.92 | 0.11 | 90.88 | 1.20 | 2 | 8.88 | 1.59 | 2 |
| G016279 | 90.24 | 0.72 | 4.88 | 0.45 | 3.23 | 0.08 | 91.76 | 0.40 | 2 | 13.70 | 5.23 | 2 |
| G016280 | 91.06 | 1.61 | 2.95 | 0.43 | 2.76 | 0.45 | 94.09 | 0.95 | 2 | 13.81 | 7.06 | 2 |
| G016281 | 94.85 | 0.41 | 1.28 | 0.01 | 3.31 | 0.47 | 95.38 | 0.46 | 2 | 13.85 | 5.45 | 2 |
| G016282 | 93.39 | 0.27 | 3.06 | 0.05 | 3.13 | 0.18 | 93.78 | 0.24 | 2 | 16.95 | 7.00 | 2 |
| G016283 | 77.09 | n/a | 5.72 | n/a | 16.13 | n/a | 77.92 | n/a | 1 | 20.40 | 3.25 | 2 |
| G016284 | 87.29 | 1.73 | 2.01 | 1.11 | 9.08 | 0.55 | 89.29 | 2.50 | 2 | 8.38 | 1.51 | 2 |
| G016285 | 60.72 | 3.51 | 8.71 | 0.53 | 13.95 | 2.51 | 72.80 | 2.87 | 2 | 15.70 | 2.12 | 2 |

TABLE 40
Percent editing and percent CD3 negative cells following TRBC editing with
Cas9

| | % C to T | | | % A to G | | | % Indel | | | % CD3 negative | | |
|---|---|---|---|---|---|---|---|---|---|---|---|---|
| Guide | Mean | SD | n | Mean | SD | n | Mean | SD | n | Mean | SD | N |
| G013015 | 0.03 | 0.04 | 2 | 0.09 | 0.01 | 2 | 99.43 | 0.14 | 2 | 93.60 | 0.28 | 2 |
| G014832 | 0.07 | 0.02 | 2 | 0.10 | 0.00 | 2 | 98.24 | 0.65 | 2 | 84.95 | 0.07 | 2 |
| G016167 | 0.01 | 0.00 | 2 | 0.00 | 0.00 | 2 | 99.36 | 0.26 | 2 | 90.10 | 0.28 | 2 |
| G016168 | 0.02 | 0.01 | 2 | 0.18 | 0.14 | 2 | 98.29 | 0.07 | 2 | 95.00 | 0.28 | 2 |
| G016171 | 0.03 | 0.04 | 2 | 0.03 | 0.02 | 2 | 99.11 | 0.34 | 2 | 91.80 | 0.71 | 2 |
| G016172 | 0.01 | 0.00 | 2 | 1.29 | 0.45 | 2 | 96.54 | 1.15 | 2 | 93.60 | 0.42 | 2 |
| G016174 | 0.05 | 0.05 | 2 | 0.14 | 0.05 | 2 | 98.65 | 0.68 | 2 | 94.10 | 0.42 | 2 |
| G016177 | 0.10 | 0.03 | 2 | 0.08 | 0.03 | 2 | 99.02 | 0.28 | 2 | 94.05 | 0.35 | 2 |
| G016179 | 0.09 | 0.02 | 2 | 0.21 | 0.04 | 2 | 97.55 | 0.18 | 2 | 93.20 | 0.42 | 2 |
| G016180 | 0.01 | 0.00 | 2 | 0.19 | 0.07 | 2 | 95.64 | 0.93 | 2 | 91.25 | 1.20 | 2 |
| G016181 | 0.25 | | 1 | 0.03 | | 1 | 94.84 | | 1 | 92.00 | 0.28 | 2 |
| G016183 | 0.04 | 0.04 | 2 | 0.01 | 0.01 | 2 | 98.56 | 0.53 | 2 | 92.90 | 0.00 | 2 |
| G016187 | 0.18 | 0.00 | 2 | 0.05 | 0.07 | 2 | 99.07 | 0.07 | 2 | 93.95 | 0.64 | 2 |
| G016188 | 0.07 | 0.03 | 2 | 0.30 | 0.07 | 2 | 94.24 | 0.69 | 2 | 85.95 | 0.35 | 2 |
| G016189 | 0.12 | 0.03 | 2 | 0.64 | 0.21 | 2 | 97.19 | 0.73 | 2 | 89.75 | 0.49 | 2 |
| G016190 | 6.51 | 6.05 | 2 | 0.15 | 0.21 | 2 | 77.21 | 4.03 | 2 | 70.55 | 0.35 | 2 |
| G016191 | 3.67 | 0.17 | 2 | 0.58 | 0.13 | 2 | 57.71 | 0.58 | 2 | 63.95 | 0.21 | 2 |
| G016192 | 0.11 | 0.08 | 2 | 0.24 | 0.09 | 2 | 98.50 | 0.20 | 2 | 89.50 | 0.28 | 2 |
| G016193 | 0.05 | 0.02 | 2 | 0.15 | 0.04 | 2 | 98.54 | 0.99 | 2 | 92.45 | 0.35 | 2 |
| G016194 | 4.24 | 0.49 | 2 | 0.06 | 0.01 | 2 | 85.43 | 0.76 | 2 | 68.00 | 0.14 | 2 |
| G016195 | 0.03 | 0.04 | 2 | 0.00 | 0.00 | 2 | 99.51 | 0.20 | 2 | 93.55 | 0.35 | 2 |
| G016196 | 0.06 | 0.01 | 2 | 0.15 | 0.05 | 2 | 80.55 | 2.75 | 2 | 82.15 | 1.34 | 2 |
| G016197 | 0.00 | 0.01 | 2 | 0.01 | 0.00 | 2 | 99.64 | 0.02 | 2 | 75.20 | 0.42 | 2 |
| G016199 | 0.15 | 0.01 | 2 | 0.22 | 0.01 | 2 | 98.25 | 0.19 | 2 | 91.70 | 0.57 | 2 |
| G016200 | 0.01 | 0.01 | 2 | 0.06 | 0.02 | 2 | 99.45 | 0.16 | 2 | 93.65 | 0.64 | 2 |
| G016201 | 0.05 | 0.05 | 2 | 0.15 | 0.00 | 2 | 93.38 | 0.20 | 2 | 85.10 | 0.71 | 2 |
| G016203 | 0.05 | n/a | 1 | 0.09 | n/a | 1 | 98.61 | n/a | 1 | 92.20 | 0.28 | 2 |
| G016204 | 0.08 | 0.02 | 2 | 0.02 | 0.01 | 2 | 99.31 | 0.23 | 2 | 92.50 | 0.57 | 2 |
| G016205 | 0.05 | 0.04 | 2 | 0.75 | 0.02 | 2 | 77.14 | 2.06 | 2 | 76.20 | 2.69 | 2 |
| G016206 | 0.24 | 0.09 | 2 | 0.24 | 0.05 | 2 | 96.55 | 0.05 | 2 | 91.85 | 0.07 | 2 |
| G016207 | 0.06 | 0.03 | 2 | 0.07 | 0.01 | 2 | 99.25 | 0.02 | 2 | 93.80 | 0.42 | 2 |
| G016211 | 0.04 | 0.02 | 2 | 0.09 | 0.01 | 2 | 84.26 | 0.46 | 2 | 87.75 | 1.34 | 2 |
| G016212 | 0.09 | 0.00 | 2 | 0.10 | 0.08 | 2 | 91.57 | 1.87 | 2 | 90.90 | 0.42 | 2 |
| G016214 | 0.07 | 0.05 | 2 | 0.16 | 0.02 | 2 | 88.68 | 0.74 | 2 | 87.10 | 0.85 | 2 |
| G016216 | 0.08 | 0.06 | 2 | 0.83 | 0.28 | 2 | 98.49 | 0.46 | 2 | 88.50 | 0.85 | 2 |
| G016217 | 0.17 | 0.06 | 2 | 0.08 | 0.01 | 2 | 98.85 | 0.25 | 2 | 93.70 | 0.85 | 2 |
| G016219 | 0.15 | 0.21 | 2 | 0.08 | 0.04 | 2 | 97.51 | 0.98 | 2 | 89.95 | 0.92 | 2 |
| G016222 | 0.03 | 0.02 | 2 | 0.08 | 0.03 | 2 | 98.09 | 0.23 | 2 | 93.35 | 0.35 | 2 |
| G016227 | 0.02 | n/a | 1 | 0.12 | n/a | 1 | 98.97 | n/a | 1 | 84.30 | 0.71 | 2 |
| G016228 | 0.12 | 0.17 | 2 | 0.10 | 0.08 | 2 | 99.05 | 0.21 | 2 | 92.65 | 0.21 | 2 |
| G016230 | 0.10 | 0.00 | 2 | 0.04 | 0.02 | 2 | 98.96 | 0.30 | 2 | 77.90 | 0.42 | 2 |
| G016232 | 0.13 | 0.04 | 1 | 0.02 | 0.01 | 1 | 99.07 | 0.51 | 1 | 94.45 | 0.21 | 2 |
| G016233 | 0.07 | 0.01 | 2 | 0.07 | 0.04 | 2 | 99.00 | 0.45 | 2 | 71.00 | 1.27 | 2 |
| G016238 | 0.09 | 0.08 | 2 | 0.14 | 0.02 | 2 | 93.50 | 0.81 | 2 | 90.90 | 0.00 | 2 |
| G016239 | 0.08 | 0.08 | 2 | 0.09 | 0.05 | 2 | 98.74 | 0.30 | 2 | 85.70 | 0.71 | 2 |
| G016240 | 0.00 | n/a | 1 | 0.05 | n/a | 1 | 98.91 | n/a | 1 | 84.50 | 0.28 | 2 |
| G016241 | 0.00 | 0.00 | 2 | 0.00 | 0.00 | 2 | 99.56 | 0.05 | 2 | 86.05 | 0.35 | 2 |
| G016242 | 0.00 | 0.00 | 2 | 0.03 | 0.03 | 2 | 98.50 | 0.02 | 2 | 87.55 | 0.64 | 2 |
| G016243 | 0.00 | 0.00 | 2 | 0.07 | 0.01 | 2 | 98.44 | 0.49 | 2 | 93.55 | 0.78 | 2 |
| G016245 | 0.45 | 0.51 | 2 | 2.10 | 0.20 | 2 | 95.23 | 1.04 | 2 | 92.70 | 0.14 | 2 |
| G016248 | 2.51 | 0.44 | 2 | 0.09 | 0.03 | 2 | 85.91 | 2.49 | 2 | 78.90 | 1.13 | 2 |
| G016249 | 0.00 | 0.00 | 0 | 0.01 | 0.00 | 0 | 98.87 | 0.42 | 0 | 93.05 | 0.07 | 2 |
| G016250 | 0.00 | 0.00 | 0 | 0.01 | 0.00 | 0 | 99.11 | 0.30 | 0 | 93.35 | 1.06 | 2 |
| G016251 | 0.01 | 0.02 | 2 | 0.04 | 0.02 | 2 | 97.64 | 1.98 | 2 | 93.40 | 0.42 | 2 |
| G016252 | 0.01 | 0.01 | 2 | 0.05 | 0.01 | 2 | 76.81 | 1.22 | 2 | 28.95 | 3.75 | 2 |
| G016253 | 0.11 | 0.08 | 2 | 0.06 | 0.05 | 2 | 95.66 | 0.25 | 2 | 67.70 | 0.71 | 2 |
| G016254 | 0.05 | 0.02 | 2 | 0.07 | 0.01 | 2 | 98.21 | 0.25 | 2 | 25.65 | 0.92 | 2 |
| G016255 | 0.01 | 0.01 | 2 | 1.08 | 1.33 | 2 | 97.81 | 0.73 | 2 | 62.75 | 0.07 | 2 |
| G016256 | 0.06 | 0.01 | 2 | 0.46 | 0.07 | 2 | 80.84 | 1.58 | 2 | 21.05 | 8.41 | 2 |
| G016257 | 0.03 | 0.02 | 2 | 0.01 | 0.00 | 2 | 97.59 | 0.32 | 2 | 85.70 | 0.00 | 2 |
| G016258 | 0.10 | 0.13 | 2 | 0.23 | 0.04 | 2 | 78.74 | 3.06 | 2 | 47.45 | 1.20 | 2 |
| G016259 | 0.00 | 0.00 | 2 | 0.21 | 0.04 | 2 | 97.82 | 0.31 | 2 | 47.00 | 2.12 | 2 |
| G016260 | 1.16 | 0.20 | 2 | 0.15 | 0.15 | 2 | 94.72 | 0.27 | 2 | 28.30 | 0.28 | 2 |
| G016261 | 0.03 | 0.04 | 2 | 0.03 | 0.04 | 2 | 95.13 | 0.46 | 2 | 90.95 | 0.07 | 2 |
| G016262 | 1.17 | 0.31 | 2 | 0.07 | 0.05 | 2 | 98.39 | 0.31 | 2 | 26.85 | 0.49 | 2 |
| G016263 | 0.05 | 0.06 | 0 | 0.08 | 0.07 | 0 | 97.11 | 2.82 | 0 | 93.50 | 0.28 | 2 |
| G016264 | 0.09 | 0.01 | 2 | 0.14 | 0.04 | 2 | 75.23 | 0.49 | 2 | 48.70 | 1.70 | 2 |
| G016265 | 0.08 | 0.01 | 2 | 0.29 | 0.01 | 2 | 47.59 | 0.92 | 2 | 15.60 | 1.13 | 2 |
| G016266 | 0.02 | 0.00 | 2 | 16.72 | 0.36 | 2 | 82.14 | 0.85 | 2 | 25.25 | 2.76 | 2 |
| G016267 | 0.09 | 0.01 | 2 | 0.15 | 0.06 | 2 | 97.50 | 0.21 | 2 | 34.20 | 1.56 | 2 |
| G016268 | 0.01 | 0.00 | 2 | 0.07 | 0.00 | 2 | 98.95 | 0.20 | 2 | 40.30 | 1.41 | 2 |
| G016269 | 0.14 | 0.06 | 2 | 0.65 | 0.01 | 2 | 38.34 | 4.64 | 2 | 15.35 | 0.64 | 2 |
| G016270 | 0.12 | 0.07 | 2 | 0.32 | 0.13 | 2 | 99.10 | 0.33 | 2 | 93.60 | 0.85 | 2 |
| G016271 | 0.16 | 0.04 | 2 | 0.10 | 0.01 | 2 | 98.21 | 0.27 | 2 | 35.55 | 5.16 | 2 |
| G016272 | 0.09 | 0.05 | 2 | 0.19 | 0.04 | 2 | 94.63 | 1.28 | 2 | 93.45 | 0.78 | 2 |
| G016273 | 0.00 | 0.00 | 2 | 0.01 | 0.00 | 2 | 97.97 | 0.37 | 2 | 92.85 | 1.20 | 2 |
| G016274 | 0.06 | 0.02 | 2 | 0.23 | 0.12 | 2 | 87.53 | 0.83 | 2 | 71.30 | 1.84 | 2 |
| G016275 | 0.24 | 0.22 | 2 | 0.03 | 0.00 | 2 | 98.58 | 0.13 | 2 | 31.50 | 2.97 | 2 |
| G016276 | 0.02 | 0.01 | 2 | 0.34 | 0.04 | 2 | 98.56 | 0.14 | 2 | 24.35 | 4.03 | 2 |
| G016277 | 0.52 | 0.04 | 2 | 0.32 | 0.04 | 2 | 97.86 | 0.06 | 2 | 31.75 | 4.31 | 2 |
| G016278 | 0.30 | 0.01 | 2 | 0.27 | 0.04 | 2 | 98.12 | 0.07 | 2 | 32.10 | 0.28 | 2 |
| G016279 | 0.59 | 0.15 | 2 | 0.14 | 0.00 | 2 | 98.69 | 0.12 | 2 | 30.20 | 5.37 | 2 |
| G016280 | 0.24 | 0.10 | 2 | 0.24 | 0.01 | 2 | 90.41 | 0.60 | 2 | 28.55 | 3.46 | 2 |
| G016281 | 0.65 | 0.88 | 2 | 0.03 | 0.04 | 2 | 98.14 | 0.28 | 2 | 92.90 | 0.42 | 2 |
| G016282 | 0.04 | 0.02 | 2 | 0.01 | 0.00 | 2 | 98.57 | 0.05 | 2 | 93.45 | 0.21 | 2 |
| G016283 | 0.01 | n/a | 1 | 0.01 | n/a | 1 | 93.16 | n/a | 1 | 87.35 | 2.47 | 2 |
| G016284 | 0.02 | 0.02 | 2 | 0.01 | 0.00 | 2 | 97.97 | 0.35 | 2 | 42.05 | 0.64 | 2 |
| G016285 | 0.06 | 0.08 | 2 | 0.01 | 0.01 | 2 | 97.89 | 0.86 | 2 | 89.80 | 0.14 | 2 |

### Example 16. Profiling RNA Off-Targets Following 1D2M Editing

### Example 16.1. T Cell Preparation

[0632] Healthy human donor apheresis was obtained commercially (Hemacare), and cells were washed and re-suspended in CliniMACS® PBS/EDTA buffer (Miltenyi Biotec Cat. No. 130-070-525) on the LOVO device. T cells were isolated via positive selection using CD4 and CD8 magnetic beads (Miltenyi Biotec Cat. No. 130-030-401/130-030-801) using the CliniMACS®) Plus and CliniMACS®) LS disposable kit. T cells were aliquoted into vials and cryopreserved in Cryostor® CS10 (StemCell Technologies Cat. 07930) for future use. Upon thawing, T cells were plated at a density of 1.0×10\hat{ }6 cells/nmL in T cell growth (TCG) media consisting of CTS OpTmiizer T cell expansion serum-free media (Thermofisher, Cat. A3705001) supplemented with 5% human AB serum (Gemini, Cat. 100-512), 1× GlutaMAX (Thermofisher, Cat. 35050061), 10 mM HEPES (Thermofisher, Cat. 15630080) and 1× of Penicillin-Streptomycin, further supplemented with 200 U/mL IL-2 (Peprotech, Cat. 200-02), 10 ng/ml IL-7 (Peprotech, Cat. 200-07), 10 ng/ml IL-15 (Peprotech, Cat. 200-15). T cells were activated with TransAct™ (1:100 dilution, Miltenyi Biotec, Cat. 130-111-160). Cells were expanded for 72 hours at 37° C. prior to mRNA electroporation.

### Example 16.2. mRNA and sgRNA Electroporation of T Cells

[0633] A solution containing mRNA encoding Cas9 (SEQ ID NO: 11), BC22n (SEQ ID NO: 2), UGI (SEQ ID NO: 26) or BE4MAX (SEQ ID NO: 32) was prepared in sterile water. A 50 μM B2M targeting sgRNA (G015995) was removed from its storage plate and denatured for 2 minutes at 95° C. before cooling at room temperature. Seventy-two hours post activation, T cells were harvested, centrifuged, and resuspended at a concentration of 12.5×10\hat{ }6 T cells/mL in P3 electroporation buffer (Lonza). For each well to be electroporated, 1×10\hat{ }5 T cells were mixed with 200 ng of mRNAs and 20 pmols of sgRNA in a final volume of 20 uL of P3 electroporation buffer. The T cell mix was transferred in 5 replicates to a 96-well Nucleofector™ plate and electroporated using the manufacturer's pulse code. Electroporated T cells were immediately rested in 80 μL of TCG media without cytokines for 15 minutes before being transferred to a new flat-bottom 96-well plate containing an additional 100 μL of TCG media supplemented with 2× cytokines cited in Section 16.1.

[0634] To evaluate RNA off-targets when expression level of BC22n peaks, a fraction of edited T cells was collected 24 h post-electroporation. This fraction was further divided into 2 plates, one of which was subjected to cell lysis, PCR amplification and NGS analysis, while the other fraction was used for RNA extraction and transcriptome sequencing. On day 3 post-electroporation, the remaining T cells were collected for cell lysis and NGS sequencing, which enabled confirmation of maximum B2M editing in these samples at a timepoint when editing is normally complete.

### Example 16.3. NGS Sequencing

[0635] At 24 and 72 h post-electroporation, T cells were subjected to lysis, PCR amplification of the B2M locus and subsequent NGS analysis, as described in Example 1. Table 41 and FIG. 25 show B2M editing levels in T cells collected at both timepoints following B2M editing.

TABLE 41
Mean editing percentages at the B2M locus following editing

| | | | % C to T | | % C to A/G | | % Indel | |
|---|---|---|---|---|---|---|---|---|
| Time (h) | mRNA | sgRNA | Mean | SD | Mean | SD | Mean | SD |
| 24 | None | None | 0.58 | 0.06 | 0.60 | 0.05 | 0.22 | 0.01 |
| | Cas9 | G015995 | 0.48 | 0.27 | 0.35 | 0.05 | 49.97 | 9.52 |
| | Cas9, UGI | G015995 | 0.35 | 0.09 | 0.36 | 0.05 | 59.44 | 11.46 |
| | BC22n, UGI | G015995 | 66.57 | 5.39 | 1.27 | 0.64 | 1.52 | 0.61 |
| | BE4MAX, UGI | G015995 | 36.83 | 4.89 | 0.70 | 0.10 | 0.38 | 0.19 |
| 72 | None | None | 0.60 | 0.09 | 0.61 | 0.06 | 0.23 | 0.06 |
| | Cas9 | G015995 | 0.33 | 0.31 | 0.28 | 0.16 | 89.74 | 1.38 |
| | Cas9, UGI | G015995 | 0.30 | 0.24 | 0.25 | 0.21 | 90.02 | 3.54 |
| | BC22n, UGI | G015995 | 91.19 | 1.80 | 1.84 | 0.64 | 1.19 | 0.37 |
| | BE4MAX, UGI | G015995 | 67.62 | 2.38 | 0.84 | 0.20 | 0.49 | 0.19 |

### Example 16.4. Whole Transcriptome Sequencing

[0636] At 24 h post-electroporation, T cells were centrifuged, and the cell pellet was resuspended in 200 uL of TRIzol™ reagent (Thermo Fisher Scientific, Cat No. 15596026) which was frozen at −80 C for future processing. Total RNA was extracted from samples in TRIzol™ reagent using the Direct-zol RNA microprep kit (Zymo Research, Cat No. R2062) following the manufacturer's protocol. Purified RNA samples were quantified in a NanoDrop™ 8000 spectrophotometer (Thermo Fisher Scientific) and diluted to 18.18 ng/uL using nuclease-free water. From each experimental group shown in FIG. 25, 3 samples were randomly chosen for transcriptomic analysis. From each sample, 100 ng (5.5 uL) of purified total RNA were depleted of ribosomal RNA (rRNA) components using the NEBNext® rRNA depletion kit (New England Biolabs, Cat. E6350L) according to the manufacturer's instructions. rRNA-depleted samples were converted into double-stranded DNA libraries using NEBNext® Ultra™ II directional RNA library prep kit for Illumina® (New England Biolabs, Cat. E7765S) following the manufacturer's protocol. Amplified libraries were quantified in a Qubit 4 fluorometer (Thermo Fisher Scientific) and the average fragment size of each library was obtained by capillary electrophoresis. Libraries were pooled at an equimolar concentration and sequenced in the Illumina NextSeq550 platform using a high-output 300-cycle kit (Illumina, Cat. 20024908).

### Example 16.5. Data Processing for Single Nucleotide Variant (SNV) Analysis

[0637] Paired-end reads were aligned to human genome GRCh38 with STAR v2.7.1a (Dobin et al., 2013). PCR duplicates were removed with Picard MarkDuplicates v2.19.0 (BroadInstitute, 2019). GATK tools SplitNCigarReads, BaseRecalibrator, ApplyBQSR v4.1.8.1 were deployed consecutively to preprocess alignments. Variations were called with GATK HaplotypeCaller (Auwera et al., 2013; DePristo et al., 2011; McKenna et al., 2010). Variants discovered from replicates of the same sample were merged using bcftools v1.8 (Li, 2011). Sample specific variants were retrieved by excluding variants discovered in controls using vcflib v1.0.0 (Garrison, 2016). Relative C to U frequencies were calculated by dividing the number of C to U variants by the total number of SNVs for each sample. Treatment groups were compared using unpaired t-tests and the statistical significance was determined using the Holm-Sidak method with an alpha of 0.05, without assuming a consistent standard deviation.

[0638] Compared to samples treated with Cas9 mRNA, T cells electroporated with both Cas9 and UGI mRNAs, BC22n and UGI mRNAs or BE4MAX and UGI mRNAs showed no statistically significant (p<0.05) increase in the frequency of C to U transitions, demonstrating the absence of detectable homology-independent cytosine deamination events in the transcriptome of these samples (Table 42 and FIG. 26).

TABLE 42
Mean percentage of SNVs in RNA transcripts that are C to U conversions

| | | % C to U SNVs | | | |
|---|---|---|---|---|---|
| | | | | p value | p value |
| mRNA(s) | sgRNA | Mean | SD | (vs. Cas9) | (vs. Cas9, UGI) |
| Cas9 | G015995 | 10.84 | 0.25 | NA | 0.42 |
| Cas9, UGI | G015995 | 11.07 | 0.35 | 0.42 | NA |
| BC22n, UGI | G015995 | 10.59 | 0.12 | 0.19 | 0.09 |
| BE4MAX, UGI | G015995 | 10.80 | 0.29 | 0.88 | 0.37 |

### Example 17. Whole Genome Sequencing of Amplified T Cell Genomes Following B2M Editing

### Example 17.1. T Cell Preparation

[0639] Healthy human donor apheresis was obtained commercially (Hemacare), and cells were washed and re-suspended in CliniMACS® PBS/EDTA buffer (Miltenyi Biotec Cat. No. 130-070-525) on the LOVO device. T cells were isolated via positive selection using CD4 and CD8 magnetic beads (Miltenyi Biotec Cat. No. 130-030-401/130-030-801) using the CliniMACS® Plus and CliniMACS® LS disposable kit. T cells were aliquoted into vials and cryopreserved in Cryostor® CS10 (StemCell Technologies Cat. 07930) for future use. Upon thawing, T cells were plated at a density of 1.0×10\hat{ }6 cells/mL in T cell growth (TCG) media consisting of CTS OpTmizer T cell expansion serum-free media (Thermofisher, Cat. A3705001) supplemented with 5% human AB serum (Gemini, Cat. 100-512), 1× GlutaMAX (Thermofisher, Cat. 35050061), 10 mM HEPES (Thermofisher, Cat. 15630080) and 1× of Penicillin-Streptomycin, further supplemented with 200 U/mL IL-2 (Peprotech, Cat. 200-02), 10 ng/ml IL-7 (Peprotech, Cat. 200-07), 10 ng/ml IL-15 (Peprotech, Cat. 200-15). T cells were activated with TransAct™ (1:100 dilution, Miltenyi Biotec, Cat. 130-111-160). Cells were expanded for 72 hours at 37° C. prior to mRNA electroporation.

### Example 17.2. mRNA and sgRNA Electroporation of T Cells

[0640] A solution containing mRNA encoding Cas9 (SEQ ID NO: 11), BC22n (SEQ ID NO: 2) or UGI (SEQ ID NO: 26) was prepared in sterile water. A 50 μM B2M targeting sgRNA (G015995) was removed from its storage plate and denatured for 2 minutes at 95° C. before cooling at room temperature. Seventy-two hours post activation, T cells were harvested, centrifuged, and resuspended at a concentration of 12.5×10^{\hat{ }6} T cells/mL in P3 electroporation buffer (Lonza). For each well to be electroporated, 1×10\hat{ }5 T cells were mixed with 200 ng of mRNAs and 20 pmols of sgRNA in a final volume of 20 uL of P3 electroporation buffer. The T cell mix was transferred in 8 replicates to a 96-well Nucleofector™ plate and electroporated using the manufacturer's pulse code. Electroporated T cells were immediately rested in 80 μL of TCG media without cytokines for 15 minutes before being transferred to a new flat-bottom 96-well plate containing an additional 100 IL of TCG media supplemented with 2× cytokines.

[0641] To promote expansion, T cells were split at the ratios of 1:4 and 1:3 on days 3 and 6 post-electroporation, respectively, using fresh TCG media with 1× cytokines. On day 7 post-electroporation, a fraction of cells was collected for flow cytometry and NGS sequencing, while the remaining cells were frozen for subsequent single-cell whole genome amplification and sequencing.

### Example 17.3. Flow Cytometry and NGS Sequencing

[0642] On day 7 post-electroporation, T cells were phenotyped by flow cytometry to evaluate loss of B2M expression levels following editing with sgRNA G015995. Briefly, T cells were incubated for 30 min at 4° C. with a mixture of antibodies against CD3 (BioLegend® Cat. No. 317340), CD4 (BioLegend® Cat. No. 300537), CD8 (BioLegend® Cat. No. 344706) and B2M (BioLegend® Cat. No. 316314), diluted at 1:200 in cell staining buffer (BioLegend® Cat. No. 420201). Cells were subsequently washed, processed on a Cytoflex flow cytometer (Beckman Coulter) and analyzed using the FlowJo software package. T cells were gated based on size, shape and B2M expression. Table 43 and FIG. 27 show the percentage of cells expressing B2M in edited T cells.

TABLE 43
Loss of B2M expression (% of cells lacking surface marker)
assessed by flow cytometry analysis of T cells harvested 7
days post-treatment with different mRNAcombinations
and B2M sgRNA G015995 (SD = standard deviation).

| | | | % B2M KO | |
|---|---|---|---|---|
| Group | sgRNA | mRNA(s) | Mean | SD |
| 1 | None | None | 0.36 | 0.32 |
| 2 | G015995 | Cas9 | 95.27 | 0.59 |
| 3 | G015995 | Cas9, UGI | 95.45 | 0.44 |
| 4 | G015995 | BC22n, UGI | 99.37 | 0.21 |

[0643] On day 7 post-electroporation, T cells were also subjected to lysis, PCR amplification of the B2M locus and subsequent NGS analysis, as described in Example 1. Table 44 and FIG. 28 show B2M editing levels in 32 samples (8 replicates per group) following B2M editing.

TABLE 44
Percent B2M editing of T cells harvested 7 days post-treatment
with different mRNA combinations and B2M sgRNA G015995
(Indels = insertions or deletions).

| Group | Sample | % C to T | % C to A/G | % Indels |
|---|---|---|---|---|
| 1- | 1 | 0.35 | 1.47 | 0.17 |
| Electroporation | 2 | 0.31 | 1.35 | 0.14 |
| only | 3 | 0.29 | 1.49 | 0.14 |
| | 4 | 0.29 | 1.48 | 0.18 |
| | 5 | 0.30 | 1.52 | 0.20 |
| | 6 | 0.27 | 1.51 | 0.21 |
| | 7 | 0.31 | 1.55 | 0.21 |
| | 8 | 0.31 | 1.57 | 0.21 |
| 2-Cas9 + | 9 | 0.08 | 0.10 | 96.96 |
| G015995 | 10 | 0.18 | 0.07 | 96.47 |
| | 11 | 0.18 | 0.08 | 97.57 |
| | 12 | 0.16 | 0.04 | 97.59 |
| | 13 | 0.16 | 0.06 | 97.53 |
| | 14 | 0.10 | 0.05 | 97.73 |
| | 15 | 0.43 | 0.11 | 96.12 |
| | 16 | 0.15 | 0.09 | 97.36 |
| 3-Cas9 + UGI + | 17 | 0.09 | 0.08 | 97.05 |
| G015995 | 18 | 0.42 | 0.17 | 96.70 |
| | 19 | 0.23 | 0.16 | 96.70 |
| | 20 | 0.28 | 0.04 | 97.20 |
| | 21 | 0.20 | 0.03 | 97.60 |
| | 22 | 0.06 | 0.09 | 97.14 |
| | 23 | 0.32 | 0.06 | 97.38 |
| | 24 | 0.16 | 0.05 | 97.36 |
| 4-BC22n + | 25 | 94.29 | 2.68 | 0.99 |
| UGI + G015995 | 26 | 93.74 | 3.25 | 1.19 |
| | 27 | 93.61 | 3.14 | 0.84 |
| | 28 | 93.94 | 2.93 | 1.01 |
| | 29 | 94.47 | 2.86 | 1.17 |
| | 30 | 94.55 | 2.53 | 1.45 |
| | 31 | 94.63 | 2.40 | 0.79 |
| | 32 | 94.14 | 2.79 | 0.78 |

### Example 17.4. Single T Cell Isolation, Lysis, Whole Genome Amplification and Sequencing

[0644] One sample from each group of 8 replicates was randomly chosen for single cell isolation, whole genome amplification and sequencing. Frozen cells from samples 12, 21 and 30 (Table 44) were transferred to a contract research organization (Singulomics Corporation, Inc.) where 10 single T cells were isolated from each sample. These single T cells were lysed, and their genomes were amplified using multiple displacement amplification (MDA), according to previously published methods (Dong et al., Nat Methods, 2017). Amplified genomes were subjected to PCR amplification of the B2M locus and subsequent NGS analysis, as described in Example 1, aiming to confirm the edited genotype in single T cells. From each group of 10 single cells, 6 DNA samples were converted into whole genome sequencing libraries using the KAPA HyperPlus kit (Roche, Cat. 07962410001), following the manufacturer's protocol. The resulting 18 libraries were sequenced in an Illumina NovaSeq 6000 platform using an S4 reagent kit v1.5 (Illumina, Cat. 20028312).

### Example 17.5. Data Processing for Single Nucleotide Variant (SNV) Analysis

[0645] Paired-end reads were aligned to human genome GRCh38 with BWA-MEM v0.7.17 (Li, 2013). PCR duplicates were removed with Picard MarkDuplicates v2.19.0 (Broad Institute, 2019). Subsequently, base scores were corrected using GATK BaseRecalibrator and ApplyBQSR v4.1.8.1 (Auwera et al., 2013; DePristo et al., 2011; McKenna et al., 2010). Variants were called using DeepVariant v1.0.0 (Poplin et al., 2018). Relative C to T frequencies were calculated by dividing the total number of C to T variants by the total number of SNVs for each sample. Treatment groups were compared using unpaired t-tests and the statistical significance was determined using the Holm-Sidak method with an alpha of 0.05, without assuming a consistent standard deviation.

[0646] Compared to samples treated with Cas9 mRNA, T cells electroporated with both Cas9 and UGI mRNAs or those treated with BC22n and UGI mRNAs, showed no statistically significant (p<0.05) increase in the frequency of C to T transitions in amplified genomic DNA, demonstrating the absence of detectable homology-independent cytosine deamination events in these samples (Table 45 and FIG. 29).

TABLE 45
Percent C to T transitions of all single nucleotide
variants (SNVs) in amplified genomic DNA
from single T cells harvested 7 days post-electroporation
with different mRNA combinations and
B2M targeting sgRNA G015995
(SD = standard deviation; NA = not applicable).

| | | % C to T SNVs | | | |
|---|---|---|---|---|---|
| | | | | p value | p value |
| sgRNA | mRNA(s) | Mean | SD | (vs. Cas9) | (vs. Cas9, UGI) |
| G015995 | Cas9 | 16.32 | 0.13 | NA | 0.21 |
| G015995 | Cas9, UGI | 16.46 | 0.21 | 0.21 | NA |
| G015995 | BC22n, UGI | 16.47 | 0.15 | 0.11 | 0.96 |

### Example 18. Whole Genome Sequencing of Clonally Expanded eHap1 Cells Following B2M Editing

### Example 18.1. eHap1 Cell Culture

[0647] Fully haploid, engineered Hap1 (eHap1) cells were obtained commercially (Horizon Discovery Cat. C669), and cells were cultured in IMDM growth media composed of Iscove's Modified Dulbecco's medium (Thermofisher Cat. 12440053) supplemented with 10% (v/v) of fetal bovine serum (Thermofisher Cat. A3840001) and 1× of Penicillin-Streptomycin (Thermofisher Cat. 15140122). Upon thawing, eHap1 cells were cultured for 48 hours at 37° C. and seeded 24 hours prior to LNP treatments at the density of 6×10\hat{ }5 cells/well in 6-well plates, which were incubated at 37° C. until treatment.

### Example 18.2. eHap1 Editing

[0648] The B2M-targeting sgRNA G015991 and mRNAs encoding Cas9 (SEQ ID NO: 11), BC22n (SEQ ID NO: 2), UGI (SEQ ID NO: 26) or BE4MAX (SEQ ID NO: 32) were formulated as individual RNA species in LNPs as described in Example 1. LNPs were applied to T cells in different combinations with at the following concentrations of total RNA: 0.104 μg/mL editor mRNA; 0.55 μg/mL UGI mRNA; 0.4175 μg/mL sgRNA. Different LNP combinations (Table 46) were pre-mixed in IMDM growth media supplemented with 10 μg/mL of recombinant human ApoE3 (Peprotech Cat. 350-02) and incubated at 37° C. for 15 minutes. The culture media of eHap1 cells was removed and each well received 3 mL of LNP mixture. Untreated controls received 3 mL of IMDM growth media supplemented with 10 μg/mL of ApoE3 without LNPs. Cells were incubated for 24 hours at 37° C. and the media was removed and replaced by IMDM growth media.

[0649] Three and five days after treatment, eHap1 cells were detached, re-seeded at a lower density, and returned to the 37° C. incubator. At the 5-day timepoint, a fraction of cells was stained with anti-B2M antibodies (BioLegend Cat. No. 316304) to evaluate the loss of B2M expression by flow cytometry. These cells were incubated for 30 min at 4° C. with anti-B2M antibodies diluted 1:200 in cell staining buffer (BioLegend® Cat. No. 420201). Cells were subsequently washed, processed on a Cytoflex flow cytometer (Beckman Coulter) and analyzed using the FlowJo software package. eHap1 cells were gated based on size, shape and B2M expression. Table 46 and FIG. 30 show B2M protein expression levels in edited eHap1 cells.

TABLE 46
Mean percent B2M negative eHap1 cells following
editing at B2M with different mRNA combinations.

| | | % B2M KO | |
|---|---|---|---|
| sgRNA | mRNA(s) | Mean | SD |
| None | None | 0.30 | 0.00 |
| G015991 | Cas9 | 71.93 | 1.93 |
| G015991 | Cas9, UGI | 75.20 | 0.46 |
| G015991 | BC22n | 74.87 | 0.67 |
| G015991 | BC22n, UGI | 91.63 | 1.39 |
| G015991 | BE4MAX | 44.00 | 2.54 |
| G015991 | BE4MAX, UGI | 55.70 | 1.66 |

[0650] Seven days after treatment, eHap1 cells were detached, the replicates from each treatment group were pooled and the resulting cell suspension was centrifuged. A small fraction of cells from each pool was collected for bulk NGS sequencing as described in Example 1. Table 47 and FIG. 31 show B2M editing levels in these samples. The remaining eHap1 cells were mixed with antibodies against B2M (BioLegend Cat. No. 316304), diluted at 1:200 (v/v) in cell staining buffer (BioLegend® Cat. No. 420201) and incubated for 30 min at 4° C. Cells were subsequently washed and processed in the MA900 fluorescence-activated cell sorting (FACS) instrument (Sony Biotechnology). Single cells negative for B2M expression were individually seeded in 96-well plates. For untreated controls, single cells with positive signal for B2M expression were plated instead. Single cells were incubated for 10 days at 37° C. to allow the establishment and expansion of single-cell clones.

TABLE 47
B2M editing results (NGS sequencing) of eHap1 cells following
treatment with different mRNA combinations and B2M sgRNA
G015991 (Indels = insertions or deletions).

| | | NGS Sequencing | | |
|---|---|---|---|---|
| sgRNA | mRNA(s) | % C to T | % C to A/G | % Indel |
| None | None | 0.19 | 0.24 | 0.27 |
| G015991 | Cas9 | 0.18 | 0.35 | 89.90 |
| G015991 | Cas9, UGI | 0.22 | 0.23 | 93.71 |
| G015991 | BC22n | 12.78 | 40.92 | 35.39 |
| G015991 | BC22n, UGI | 93.08 | 0.55 | 1.24 |
| G015991 | BE4MAX | 25.51 | 15.65 | 16.17 |
| G015991 | BE4MAX, UGI | 63.57 | 0.28 | 0.75 |

### Example 18.3. Clonal Expansion, Extraction of Genomic DNA and Whole Genome Sequencing

[0651] After 10 days in culture, clones were visually inspected under an inverted fluorescence microscope. Twelve clones from each treatment group were transferred to 6-well plates to enable further expansion. A small fraction of cells from each clone was collected for NGS sequencing as described in Example 1, while the remaining cells were seeded in 6-plates and cultured at 37° C. until confluence was reached. Based on their on-target editing outcomes, 5 clones per group were selected for whole genome sequencing. Cells from all clonal populations, in addition to one non-clonal sample of eHap1 cells, were lysed and their genomic DNA was extracted using the DNeasy Blood & Tissue kit (Qiagen Cat. 69504) following the manufacturer's protocol. DNA samples were converted into whole genome sequencing libraries using the KAPA HyperPlus kit (Roche, Cat. 07962410001), following the manufacturer's instructions. The resulting 36 libraries were sequenced in an Illumina NovaSeq 6000 platform using an S4 reagent kit v1.5 (Illumina, Cat. 20028312).

### Example 18.4. Data Processing for Single Nucleotide Variant (SNV) Analysis

[0652] Reads from each sample were first aligned to the human genome build hg38 with bwa (v0.7.17) (Li, 2013; Li and Durbin, 2010). Alignments were processed with samtools (v1.11) modules fixmate, sort and markdup, consecutively (Kumaran et al., 2019; Li et al., 2009). Variations were called from processed alignments using DeepVariant (v1.0.0) (Poplin et al., 2018). Variants from each sample were then merged using GLnexus (v1.3.1) (Lin et al., 2018; Yun et al., 2021). Variants that occurred in the non-clonal sample of eHap1 cells were excluded from all clonal samples. Variants with read depth below 10 or genotype quality score below 15 were ignored as well. Relative C to T frequencies were calculated by dividing the total number of C to T variants by the total number of SNVs for each sample. Treatment groups were compared using unpaired t-tests and the statistical significance was determined using the Holm-Sidak method with an alpha of 0.05, assuming a consistent standard deviation.

[0653] Compared to untreated controls, eHap1 cells treated with Cas9, BC22n or BE4MAX mRNA, in the absence or presence of UGI mRNA, did not show a statistically significant (p<0.05) increase in the frequency of C to T transitions in the genome, demonstrating the absence of detectable homology-independent cytosine deamination events in these samples (Table 48 and FIG. 32).

TABLE 48
Percent C to T transitions among all single nucleotide variants (SNVs)
in clonally expanded eHap1 cells following editing at B2M with
different mRNA combinations (NA = not applicable).

| | | % C to T SNVs | | | |
|---|---|---|---|---|---|
| | | | | p value | Significant? |
| sgRNA | mRNA(s) | Mean | SD | (vs. Group 1) | (p < 0.05?) |
| None | None | 12.52 | 0.43 | NA | NA |
| G015991 | Cas9 | 12.16 | 0.09 | 0.105 | no |
| G015991 | Cas9, UGI | 12.04 | 0.42 | 0.112 | no |
| G015991 | BC22n | 12.44 | 0.53 | 0.820 | no |
| G015991 | BC22n, UGI | 12.08 | 0.84 | 0.336 | no |
| G015991 | BE4MAX | 12.19 | 0.48 | 0.284 | no |
| G015991 | BE4MAX, UGI | 12.59 | 0.48 | 0.789 | no |

### Example 19. Simultaneous Quadruple Edits with BC22n or Cas9 in T Cells after Delivery Via Electroporation or LNP

[0654] To assess the amount of structural genomic changes associated with delivery conditions and editing by Cas9 or base editor, T cells treated with electroporation to deliver RNP or lipid nanoparticles (LNP) to deliver four guides and either Cas9 or BC22n were analyzed for cell viability, DNA double-stranded breaks, editing, surface protein expression, and chromosomal structural.

### Example 19.1. T Cell Preparation

[0655] Healthy human donor apheresis was obtained commercially (Hemacare), and cells were washed and re-suspended in CliniMACS® PBS/EDTA buffer (Miltenyi Biotec Cat. No. 130-070-525) on the LOVO device. T cells were isolated via negative selection using EasySep™ Human T Cell Isolation Kit (Stemcell Cat. No. 17951). T cells were aliquoted into vials and cryopreserved in a 1:1 formulation of Cryostor® CS10 (StemCell Technologies Cat. No. 07930) and Plasmalyte A (Baxter Cat. No. 2B2522X) for future use.

[0656] Upon thaw, T cells were plated at a density of 1.0×10\hat{ }6 cells/mL in OpTmizer-based media containing CTS OpTmizer T Cell Expansion SFM and T Cell Expansion Supplement (ThermoFisher Cat. A1048501), 5% human AB serum (GeminiBio, Cat. 100-512) 1× Penicillin-Streptomycin, 1× Glutamax, 10 mM HEPES, 200 U/mL recombinant human interleukin-2 (Peprotech, Cat. 200-02), 5 ng/ml recombinant human interleukin 7 (Peprotech, Cat. 200-07), and 5 ng/ml recombinant human interleukin 15 (Peprotech, Cat. 200-15). T cells were activated with TransAct™ (1:100 dilution, Miltenyi Biotec) in this media for 72 hours, at which time they were washed and plated in quadruplicate for editing either by electroporation or lipid nanoparticle.

### Example 19.2. Single gRNA and 4 gRNA T Cell Editing with Lipid Nanoparticles

[0657] LNPs were formulated generally as in Example 1 with a single RNA species cargo. Cargo was selected from an mRNA encoding BC22n, an mRNA encoding Cas9, an mRNA encoding UGI, sgRNA G015995 targeting B2M, sgRNA G016017 targeting TRAC, sgRNA G016200 targeting TRBC or sgRNA G016086 targeting CIITA. Each LNP was incubated in OpTmizer-based media with cytokines as described above supplemented with 20 ug/ml recombinant human ApoE3 (Peprotech, Cat. 350-02) for 15 minutes at 37° C. Seventy-two hours post activation, T cells were washed and suspended in OpTmizer media with cytokines without human serum. For single sgRNA editing conditions, pre-incubated LNP mix was added to the each well of 100,000 cells to yield a final concentration of 2.3 ug/ml editor mRNA (BC22n or Cas9), 1.1 ug/mL UGI and 4.6 ug/uL G016017. For four-plex sgRNA editing LNP mix was added to the each well of 100,000 cells to yield a final concentration of 2.3 ug/ml editor mRNA (BC22n or Cas9), 1.1 ug/mL UGI, 1.15 ug/uL G015995, 1.15 ug/uL G016017, 1.15 ug/uL G016200 and 1.15 ug/uL G016086. A control group including unedited T cells (no LNP) was also included. At 16 hours post-delivery, a subset of cells was used to measure cell viability and another subset of cells was processed for imaging of γH2AX foci. The remaining T cells continued to expand in culture. Media was changed 5 days and 8 days after activation and on the eleventh day post activation, cells were harvested for analysis by NGS, flow cytometry and UnIT. NGS was performed as in Example 1.

### Example 19.3. Single gRNA and 4 gRNA T Cell Editing with mRNA Electroporation

[0658] Electroporation was performed 72 hours post activation. sgRNA G015995 (SEQ ID NO: 182) targeting B2M, sgRNA G016017 (SEQ ID NO: 184) targeting TRAC, sgRNA G016200 (SEQ ID NO:801) targeting TRBC and sgRNA G016086 (SEQ ID NO: 586) were denatured for 2 minutes at 95° C. before cooling at room temperature for 10 minutes. T cells were harvested, centrifuged, and resuspended at a concentration of 12.5×10\hat{ }6 T cells/mL in P3 electroporation buffer (Lonza). For single sgRNA editing conditions, 1×10≡T cells were mixed with 40 ng/uL of editor mRNA (BC22n or Cas9), 10 ng/uL of UGI mRNA and 80 pmols of sgRNA in a final volume of 20 uL of P3 electroporation buffer. For four-plex sgRNA editing conditions, 1×10\hat{ }5 T cells were mixed with 40 ng/uL of editor mRNA (BC22n or Cas9), 10 ng/uL of UGI mRNA and 20 pmols of the four individual sgRNA in a final volume of 20 uL of P3 electroporation buffer. This mix was transferred in quadruplicate to a 96-well Nucleofector™ plate and electroporated using a manufacturer's pulse code. Electroporated T cells were rested in 80 ul of OpTmizer-based media with cytokines before being transferred to a new flat-bottom 96-well plate. A control group including unedited T cells (no EP) was also included. At 16 hours post-delivery, a subset of cells was used to measure cell viability and another subset of cells was processed for imaging of γH2AX foci.

### Example 19.4. Relative Viability Via Cell Titer Glo

[0659] Sixteen hours post electroporation or lipid nanoparticle delivery 20 uL of control or edited cells were removed from original plate and added to a new flat-bottom 96-well plate with black walls (Corning Cat. 3904). CellTiter-Glo® 2.0 (Promega Cat. G9241) was added and samples were processed according to manufacturer's protocol. Relative luminescence units (RLU) were readout by the CLARIstar plus (BMG Labtech) plate reader with gain set at 3600. Relative viability as shown in Table 49 and FIG. 33 was calculated by dividing all sample RLU by the average of untreated control RLU. All electroporation conditions had a greater than 5-fold viability drop from untreated control levels whereas LNP treatment, even with 4 guides editing simultaneously, maintained cell viability at close to untreated control samples.

TABLE 49
Relative cell viability 16 hours following treatment
with various editing and delivery conditions

| | | EP | | LNP | |
|---|---|---|---|---|---|
| Editor | Guide(s) | Mean | SD | Mean | SD |
| No Editor | No guide | 100.00 | 2.52 | 100.00 | 5.90 |
| No Editor | G016017 | 13.88 | 1.05 | 89.48 | 1.77 |
| Cas9 | G016017 | 13.25 | 1.18 | 96.43 | 9.82 |
| BC22n | G016017 | 14.78 | 1.37 | 91.20 | 4.67 |
| Cas9 | 4 guides | 13.45 | 0.65 | 98.30 | 4.80 |
| BC22n | 4 guides | 14.38 | 1.49 | 103.40 | 2.75 |

### Example 19.5. Staining, Imaging and Quantification of γH2AX Foci

[0660] 16 hours post electroporation or lipid nanoparticle delivery T cells were cytospun to a slide using Cytospin 4 (Thermo Fisher). After 5 min pre-extraction in PBS/0.5% Trion X-100 on ice, cells were fixed in 4% paraformaldehyde for 10 min. Then, cells were washed in PBS several times and blocked in PBS/0.1% TX-100/1% BSA for 30 min. Primary antibody (Mouse anti-phospho-Histone H2A.X (Ser139) (Millipore Cat. 05-636) was incubated in the blocking buffer at 4° C. overnight. After washed in PBS/0.05% Tween-20 three times, secondary antibody (Goat anti-Mouse IgG Alexa 568 (Thermo Fisher Cat. A31556) was incubated in the blocking buffer at room temperature for 30 min. Cells were washed in PBS/0.05% Tween-20 and nuclei were counter stained with Hoechst 33342. Images were generated by confocal imaging with the Leica SP8. Image analysis was performed via a custom protocol on Thermo Scientific HCS Studio Cell Analysis Software Spot Detector module. Table 50 and FIG. 34 show total γH2AX spot intensity per nuclei following treatment with stated editing and delivery conditions. EP Cas9 with 4 guides samples showed a significant increase in gH2AX foci per nuclei over LNP Cas9-4 guide samples.

TABLE 50
Mean total γH2AX spot intensity per nuclei following treatment with various
editing and delivery conditions

| | No editor | | | Cas9, 4 guides | | | BC22n, 4 guides | | |
|---|---|---|---|---|---|---|---|---|---|
| Delivery | Mean | SD | N | Mean | SD | N | Mean | SD | N |
| Untreated | 134.33 | 95.78 | 5 | | | | | | |
| EP | | | | 21386.62 | 4336.69 | 3 | Not done | | |
| LNP | | | | 2550.88 | 562.77 | 3 | 1770.11 | 291.97 | 5 |

### Example 19.6. Flow Cytometry and NGS Sequencing

[0661] On day 8 post-editing, T cells were phenotyped by flow cytometry to determine B2M, CD3 and HLA II-DR, DP, DQ protein expression as described in Example 6 using antibodies targeting B2M-APC/Fire™ 750 (BioLegend® Cat. No. 316314), CD3-BV605 (BioLegend® Cat. No. 316314) and HLA II-DR, DP, DQ-PE (BioLegend® Cat. No. 361716). DNA samples were subjected to PCR and subsequent NGS analysis, as described in Example 1. Table 51 and FIG. 35 show percent editing at loci of interest following treatment with LNPs. In the condition where 4 guides were delivered by LNP, percent editing is higher at each locus with BC22n than with Cas9. Table 52 and FIG. 36 show surface protein expression of interest following LNP treatment. Editing with BC22n resulted in a greater percentage of triple knockout cells than editing with Cas9.

TABLE 51
Mean percent editing following treatment with stated editing schemes by LNP
delivery.

| | | Readout | C-to-T % | | | C-to-A/G % | | | Indel % | | |
|---|---|---|---|---|---|---|---|---|---|---|---|
| Editor | Guide(s) | Locus | Mean | SD | N | Mean | SD | N | Mean | SD | N |
| No Editor | No guide | B2M | 0.20 | 0.00 | 2 | 0.41 | 0.01 | 2 | 0.13 | 0.01 | 2 |
| | | TRAC | 0.05 | 0.07 | 2 | 0.53 | 0.01 | 2 | 0.09 | 0.01 | 2 |
| | | TRBC1 | 0.25 | 0.07 | 2 | 0.86 | 0.09 | 2 | 0.24 | 0.02 | 2 |
| | | TRBC2 | 0.30 | 0.14 | 2 | 0.85 | 0.04 | 2 | 0.27 | 0.01 | 2 |
| | | CIITA | 0.15 | 0.07 | 2 | 0.26 | 0.03 | 2 | 0.06 | 0.00 | 2 |
| Cas9 | G016017 | TRAC | 0.00 | 0.00 | 2 | 0.05 | 0.00 | 2 | 96.59 | 0.52 | 2 |
| | 4 guides | B2M | 0.30 | 0.14 | 2 | 0.37 | 0.21 | 2 | 83.61 | 2.72 | 2 |
| | | TRAC | 0.00 | 0.00 | 2 | 0.06 | 0.04 | 2 | 89.45 | 0.25 | 2 |
| | | TRBC1 | 0.00 | 0.00 | 2 | 0.35 | 0.01 | 2 | 75.98 | 2.09 | 2 |
| | | TRBC2 | 0.00 | 0.00 | 2 | 0.38 | 0.03 | 2 | 78.07 | 1.51 | 2 |
| | | CIITA | 0.20 | 0.14 | 2 | 0.38 | 0.04 | 2 | 55.23 | 0.92 | 2 |
| BC22n | G016017 | TRAC | 93.90 | 0.57 | 2 | 2.29 | 0.29 | 2 | 2.34 | 0.08 | 2 |
| | 4 guides | B2M | 95.65 | 0.07 | 2 | 1.42 | 0.23 | 2 | 1.07 | 0.16 | 2 |
| | | TRAC | 95.00 | 0.57 | 2 | 1.65 | 0.07 | 2 | 1.44 | 0.43 | 2 |
| | | TRBC1 | 92.40 | 0.00 | 2 | 1.55 | 0.18 | 2 | 1.91 | 0.10 | 2 |
| | | TRBC2 | 92.50 | 0.00 | 2 | 1.62 | 0.02 | 2 | 1.87 | 0.33 | 2 |
| | | CIITA | 91.35 | 0.35 | 2 | 0.93 | 0.04 | 2 | 0.64 | 0.04 | 2 |

TABLE 52
Mean percentage of cells expressing surface following
treatment with stated editing schemes by LNP delivery.

| Editor | Guide | Surface protein | Mean | SD | N |
|---|---|---|---|---|---|
| No | No guide | CD3- | 2.30 | 2.12 | 2 |
| Editor | | B2M- | 4.00 | 2.26 | 2 |
| | | HLA DP DQ DR- | 60.40 | 1.70 | 2 |
| Cas9 | G016017 | CD3- | 97.05 | 0.16 | 2 |
| | 4 guides | B2M- | 77.90 | 4.67 | 2 |
| | | CD3- | 94.54 | 1.34 | 2 |
| | | HLA DP DQ DR- | 70.10 | 4.81 | 2 |
| | | CD3- B2M- HLA DP DQ DR- | 61.58 | 5.42 | 2 |
| BC22n | G016017 | CD3- | 96.20 | 0.13 | 2 |
| | 4 guides | B2M- | 97.35 | 0.37 | 2 |
| | | CD3- | 97.34 | 0.08 | 2 |
| | | HLA DP DQ DR- | 93.46 | 0.89 | 2 |
| | | CD3- B2M-HLA DP DQ DR- | 90.63 | 0.89 | 2 |

### Example 19.7. Measuring Structural Variation and Translocations by UnIT

[0662] On day 8 post-editing a subset of T cells from the untreated, LNP-Cas9-4 guides and LNP-BC22n-4 guides samples were collected, spun down and resuspended in 100 uL of PBS. gDNA was isolated from the cells using DNeasy Blood & Tissue Kit (Qiagen Cat. 69504). The UnIT structural variant characterization assay was applied to these gDNA samples. High molecular weight genomic DNA is simultaneously fragmented and sequence-tagged (‘tagmented’) with the Tn5 transposase and an adapter with a partial Illumina P5 sequence and a 12 bp unique molecular identifier (UMI). Two sequential PCRs using a primer to P5 and hemi-nested gene specific primers (GSP) imparting the Illumina the P7 sequence to create two Illumina compatible NGS libraries per sample. Sequencing across both directions of the CRISPR/Cas9 targeted cut site with the two libraries allows the inference and quantification of structural variants in DNA repair outcomes after genome editing. If the two fragments were aligned to different chromosomes, the SV was classified as an “inter-chromosomal translocation.” Structural variation results show that interchromosomal translocations are reduced to background levels when multiplex editing is being conducted by BC22n whereas Cas9 multiplex editing leads to significant increases in structural variation, as shown in Table 53 and FIG. 37.

TABLE 53
Mean percent interchromosomal translocations
among total unique molecule identifiers following treatment
with stated editing schemes by LNP delivery.

| Edit | Locus | Mean | SD | N |
|---|---|---|---|---|
| Untreated | B2M | 0.16 | 0.09 | 2 |
| | TRAC | 0.21 | 0.13 | 2 |
| | CIITA | 0.10 | 0.04 | 2 |
| Cas9, 4 guides | B2M | 2.71 | 0.52 | 2 |
| | TRAC | 1.55 | 0.24 | 2 |
| | CIITA | 0.92 | 0.37 | 2 |
| BC22n, 4 guides | B2M | 0.14 | 0.06 | 2 |
| | TRAC | 0.21 | 0.08 | 2 |
| | CIITA | 0.14 | 0.08 | 2 |

### Example 20—CD38 Guide RNA Screening in T Cells with Cas9 and BC22n

### Example 20.1 T Cell Preparation

[0663] T cells were edited at the CD38 locus with either Cas9 or with BC22n and UGI mRNAs to assess the editing outcomes and the corresponding loss of CD38 expression.

[0664] Healthy human donor apheresis was obtained commercially (Hemacare), and cells were washed and resuspended in CliniMACS PBS/EDTA buffer (Miltenyi Biotec, Cat. No. 130-070-525) on the LOVO device. T cells were isolated via positive selection using CD4 and CD8 magnetic beads (Miltenyi Biotec, Cat. No. 130-030-401/130-030-801) using the CliniMACS Plus and CliniMACS LS disposable kit. T cells were aliquoted into vials and cryopreserved in Cryostor CS10 (StemCell Technologies, Cat. No. 07930) for future use. Upon thaw, T cells were plated at a density of 1.0×10\hat{ }6 cells/mL in T cell X-VIVO 15 expansion media composed of X-VIVO 15 (Lonza, Cat. No. BE02-06Q) containing 5% (v/v) of fetal bovine serum (ThermoFisher, Cat. No. A3160902), 50 μM (1×) 2-Mercaptothanol (ThermoFisher, Cat. No. 31350010), 1% of Penicillin-Streptomycin (ThermoFisher, Cat. No. 15140122), 1 M N-acetyl L-cystine (Fisher, Cat. No. ICN19460325) diluted in phosphate buffered saline (PBS) and normalized to pH 7, supplemented with 100 U/mL of recombinant human interleukin-2 (Peprotech, Cat. No. 200-02), 5 ng/mL recombinant human interleukin-7 (Peprotech, Cat. No. 200-07) and 5 ng/mL recombinant human interleukin-15 (Peprotech, Cat. No. 200-15). T cells were activated with TransAct™ (1:100 dilution, Miltenyi Biotec, Cat. No. 130-111-160). Cells were expanded for 72 hours at 37° C. prior to mRNA electroporation.

### Example 20.2 T Cell Editing with RNA Electroporation

[0665] Solutions containing mRNA encoding Cas9 protein, BC22n, or UGI were prepared in sterile water. 50 μM CD38 targeting sgRNAs were removed from their storage plates and denatured for 2 minutes at 95° C. and incubated at room temperature for 5 minutes. Seventy-two hours post activation, T cells were harvested, centrifuged, and resuspended at a concentration of 12.5×10\hat{ }6 T cells/mL in P3 electroporation buffer (Lonza). Messenger RNAs were prepared as described in Example 1. For each well to be electroporated, 1×10\hat{ }5 T cells were mixed with 200 ng of Cas9 or BC22n mRNAs, 200 ng of UGI mRNA and 20 pmols of sgRNA as described in Table 54 in a final volume of 20 μL of P3 electroporation buffer. This mix was transferred in duplicate to a 96-well Nucleofector™ plate and electroporated using the manufacturer's pulse code. Electroporated T cells were immediately rested in 80 μL of X-VIVO 15 media without cytokines for 15 minutes before being transferred to new flat-bottom 96-well plates containing an additional 90 μL of X-VIVO 15 media supplemented with 2× cytokines. The resulting plates were incubated at 37° C. for 10 days. To promote expansion, T cells were split at the ratios of 1:4 and 1:3 on days 3 and 6 post-electroporation, respectively, using fresh X-VIVO 15 media with 1× cytokines. On day 9 post-electroporation, cells were split 1:2 in 2 U-bottom plates and one plate was collected for NGS sequencing, while the other plate was used for flow cytometry on Day 10.

### Example 20.3 Flow Cytometry and NGS Sequencing

[0666] On day 10 post-editing, T cells were phenotyped by flow cytometry to determine CD38 receptor expression. Briefly, T cells were incubated for 30 min at 4° C. with a mixture of antibodies against CD3 (BioLegend, Cat. No. 317340), CD4 (BioLegend, Cat. No. 300537), CD8 (BioLegend, Cat. No. 344706) diluted at 1:200 and CD38 (BioLegend, Cat. No. 303546), diluted at 1:100 in cell staining buffer (BioLegend, Cat. No. 420201). Cells were subsequently washed and stained with viability antibody DAPI (BioLegend, Cat. No. 422801) diluted at 1:10,000 in cell staining buffer. Cells were then processed on a Cytoflex flow cytometer (Beckman Coulter) and analyzed using the FlowJo software package. T cells were gated based on size, shape, viability, and CD38 expression.

[0667] On day 9 DNA samples were subjected to PCR and subsequent NGS analysis, as described in Example 1. Table 54 shows CD38 gene editing and CD38 positive results for cells edited with BC22n or Cas9.

TABLE 54
Percent editing and percent of CD38 positive cells following CD38 editing
with Cas9 or BC22n base editor

| | Cas9 % Indels | | | Cas9 % CD38+ | | | BC22n % C to T | | | BC22 % CD38+ | | |
|---|---|---|---|---|---|---|---|---|---|---|---|---|
| Guide ID | Mean | SD | N | Mean | SD | N | Mean | SD | N | Mean | SD | N |
| G019761 | 94.82 | 0.97 | 2 | 22.35 | 0.49 | 2 | 87.21 | 1.57 | 2 | 56.45 | 2.05 | 2 |
| G019762 | 98.19 | 0.63 | 2 | 15.45 | 1.06 | 2 | 85.04 | 0.42 | 2 | 58.55 | 0.07 | 2 |
| G019763 | 91.42 | 1.77 | 2 | 8.17 | 2.38 | 2 | 87.01 | 0.51 | 2 | 2.53 | 0.21 | 2 |
| G019764 | 87.78 | 1.04 | 2 | 11.80 | 0.71 | 2 | 87.00 | 2.33 | 2 | 41.40 | 2.12 | 2 |
| G019765 | 96.43 | 0.40 | 2 | 13.15 | 2.33 | 2 | 81.51 | 5.02 | 2 | 60.40 | 1.27 | 2 |
| G019766 | 97.61 | 0.06 | 2 | 5.31 | 1.15 | 2 | 80.51 | 2.67 | 2 | 61.80 | 0.85 | 2 |
| G019767 | 97.54 | 0.08 | 2 | 17.45 | 0.21 | 2 | 81.92 | 0.46 | 2 | 62.55 | 3.46 | 2 |
| G019768 | 96.65 | 0.96 | 2 | 2.19 | 1.06 | 2 | 89.45 | 0.78 | 2 | 2.49 | 1.18 | 2 |
| G019769 | 95.63 | 2.44 | 2 | 2.58 | 0.35 | 2 | 69.93 | 5.38 | 2 | 14.40 | 4.81 | 2 |
| G019770 | 97.74 | 1.26 | 2 | 1.15 | 0.59 | 2 | 85.06 | 5.81 | 2 | 38.80 | 3.54 | 2 |
| G019771 | 96.90 | 0.54 | 2 | 1.18 | 0.18 | 2 | 87.34 | 0.16 | 2 | 1.39 | 0.26 | 2 |
| G019772 | 96.38 | 0.05 | 2 | 14.50 | 1.98 | 2 | 88.86 | 0.71 | 2 | 70.25 | 1.63 | 2 |
| G019773 | 95.38 | 2.21 | 2 | 6.70 | 0.57 | 2 | 79.83 | 0.15 | 2 | 64.15 | 4.45 | 2 |
| G019774 | 97.12 | 0.07 | 2 | 14.55 | 0.92 | 2 | 71.14 | 2.52 | 2 | 68.60 | 2.83 | 2 |
| G019775 | 95.33 | 3.04 | 2 | 16.75 | 1.63 | 2 | 92.02 | 0.11 | 2 | 74.90 | 0.28 | 2 |
| G019776 | 98.87 | 0.45 | 2 | 1.95 | 1.04 | 2 | 84.25 | 0.57 | 2 | 11.45 | 1.63 | 2 |
| G019777 | 97.87 | 0.54 | 2 | 14.00 | 1.27 | 2 | 86.76 | 1.32 | 2 | 71.75 | 2.62 | 2 |
| G019778 | 95.81 | 1.24 | 2 | 13.75 | 1.48 | 2 | 86.96 | 1.81 | 2 | 62.30 | 2.26 | 2 |
| G019779 | 97.78 | 0.26 | 2 | 10.87 | 2.17 | 2 | 88.77 | 0.53 | 2 | 74.35 | 0.07 | 2 |
| G019780 | 95.75 | 1.84 | 2 | 14.00 | 2.55 | 2 | 89.81 | 0.30 | 2 | 69.05 | 3.18 | 2 |
| G019781 | 93.81 | 2.35 | 2 | 15.90 | 0.85 | 2 | 86.84 | 4.62 | 2 | 68.30 | 0.71 | 2 |
| G019782 | 93.10 | 4.65 | 2 | 10.21 | 2.82 | 2 | 82.19 | 1.92 | 2 | 63.15 | 0.49 | 2 |
| G019783 | 97.88 | 0.30 | 2 | 2.58 | 0.40 | 2 | 77.26 | 4.30 | 2 | 64.10 | 0.14 | 2 |
| G019784 | 97.61 | 0.86 | 2 | 16.80 | 2.69 | 2 | 76.82 | 0.81 | 2 | 69.00 | 0.71 | 2 |
| G019785 | 98.30 | 0.27 | 2 | 1.58 | 0.66 | 2 | 80.95 | 1.14 | 2 | 33.90 | 5.80 | 2 |
| G019786 | 86.22 | 3.34 | 2 | 28.10 | 4.67 | 2 | 88.42 | 2.78 | 2 | 72.35 | 5.02 | 2 |
| G019787 | 98.76 | 0.45 | 2 | 2.06 | 0.86 | 2 | 80.23 | 2.14 | 2 | 1.89 | 0.83 | 2 |
| G019788 | 96.34 | 1.98 | 2 | 11.05 | 0.92 | 2 | 90.88 | 0.06 | 2 | 1.88 | 0.21 | 2 |
| G019789 | 97.68 | 1.33 | 2 | 15.80 | 1.27 | 2 | 67.12 | n.a. | 1 | 52.85 | 1.34 | 2 |
| G019790 | 94.58 | 1.87 | 2 | 12.15 | 0.07 | 2 | 89.81 | 0.22 | 2 | 77.10 | 2.69 | 2 |
| G019791 | 97.79 | 0.90 | 2 | 3.25 | 0.86 | 2 | 79.56 | 3.97 | 2 | 9.51 | 0.62 | 2 |
| G019792 | 96.99 | 0.13 | 2 | 9.19 | 0.11 | 2 | 85.20 | 4.14 | 2 | 64.65 | 0.35 | 2 |
| G019793 | 96.13 | 0.29 | 2 | 19.95 | 2.33 | 2 | 85.55 | 2.40 | 2 | 71.40 | 2.69 | 2 |
| G019794 | 98.30 | 0.28 | 2 | 12.75 | 0.07 | 2 | 76.28 | 0.67 | 2 | 31.40 | 0.85 | 2 |
| G019795 | 97.56 | 0.59 | 2 | 2.52 | 0.56 | 2 | 91.40 | 2.37 | 2 | 1.22 | 0.34 | 2 |
| G019796 | 97.70 | 1.27 | 2 | 7.60 | 2.87 | 2 | 92.29 | 0.28 | 2 | 6.52 | 0.16 | 2 |
| G019797 | 97.04 | 0.26 | 2 | 9.80 | 2.26 | 2 | 87.45 | 0.46 | 2 | 3.07 | 0.84 | 2 |
| G019798 | 97.56 | 1.17 | 2 | 4.92 | 0.93 | 2 | 89.68 | 0.89 | 2 | 59.05 | 1.34 | 2 |
| G019799 | 97.65 | 0.22 | 2 | 8.83 | 1.46 | 2 | 87.59 | 0.90 | 2 | 66.85 | 0.49 | 2 |
| G019800 | 76.71 | 3.24 | 2 | 25.45 | 4.88 | 2 | 74.46 | 2.84 | 2 | 16.00 | 3.54 | 2 |
| G019801 | 92.76 | 3.74 | 2 | 6.10 | 2.28 | 2 | 82.69 | 0.52 | 2 | 33.65 | 4.03 | 2 |
| G019802 | 64.21 | 7.62 | 2 | 33.70 | 5.52 | 2 | 69.14 | 0.45 | 2 | 73.00 | 0.42 | 2 |
| G019803 | 50.46 | 6.67 | 2 | 43.50 | 5.23 | 2 | 45.01 | 1.82 | 2 | 55.40 | 1.98 | 2 |
| G019804 | 89.70 | 3.71 | 2 | 7.05 | 3.23 | 2 | 21.88 | 0.42 | 2 | 67.25 | 2.76 | 2 |
| G019805 | 52.39 | 2.21 | 2 | 40.30 | 0.14 | 2 | 78.69 | 4.52 | 2 | 9.15 | 1.77 | 2 |
| G019806 | 93.47 | 0.40 | 2 | 4.64 | 0.82 | 2 | 72.68 | 1.54 | 2 | 21.30 | 4.95 | 2 |
| G019807 | 86.45 | 2.17 | 2 | 12.70 | 1.84 | 2 | 63.32 | 3.90 | 2 | 65.85 | 0.21 | 2 |
| G019808 | 97.15 | 0.70 | 2 | 2.23 | 1.37 | 2 | 32.87 | 6.70 | 2 | 64.10 | 1.84 | 2 |
| G019809 | 41.04 | 6.38 | 2 | 56.35 | 4.31 | 2 | 68.30 | 3.73 | 2 | 27.50 | 5.94 | 2 |
| G019810 | 46.14 | 4.29 | 2 | 52.05 | 5.16 | 2 | 78.63 | 2.98 | 2 | 10.40 | 2.97 | 2 |
| G019811 | 95.15 | 0.67 | 2 | 14.05 | 1.06 | 2 | 83.21 | 2.11 | 2 | 4.42 | 2.68 | 2 |
| G019812 | 93.95 | 1.06 | 2 | 4.46 | 2.11 | 2 | 84.23 | 5.13 | 2 | 24.90 | 2.55 | 2 |
| G019813 | 96.79 | 1.07 | 2 | 2.51 | 0.60 | 2 | 75.68 | 3.13 | 2 | 5.51 | 1.97 | 2 |
| G019814 | 87.26 | 0.64 | 2 | 11.56 | 2.75 | 2 | 72.31 | 1.65 | 2 | 13.80 | 2.83 | 2 |
| G019815 | 77.53 | 7.29 | 2 | 18.65 | 3.89 | 2 | 86.69 | 0.87 | 2 | 8.47 | 0.74 | 2 |
| G019816 | 76.89 | 1.37 | 2 | 38.25 | 6.86 | 2 | 87.17 | 2.00 | 2 | 8.82 | 2.94 | 2 |
| G019817 | 90.53 | 1.09 | 2 | 5.95 | 1.39 | 2 | 72.59 | 1.92 | 2 | 33.85 | 1.34 | 2 |
| G019818 | 97.71 | 0.21 | 2 | 1.69 | 0.57 | 2 | 77.99 | 3.46 | 2 | 14.15 | 3.75 | 2 |
| G019819 | 94.33 | 1.87 | 2 | 3.70 | 2.29 | 2 | 84.14 | 3.95 | 2 | 2.47 | 0.45 | 2 |
| G019820 | 82.74 | 4.09 | 2 | 21.00 | 3.39 | 2 | 81.28 | 0.66 | 2 | 14.80 | 2.12 | 2 |
| G019821 | 70.98 | 8.64 | 2 | 26.80 | 8.49 | 2 | 73.39 | 3.46 | 2 | 11.09 | 3.27 | 2 |
| G019822 | 46.59 | 2.28 | 2 | 50.80 | 5.09 | 2 | 58.43 | 2.69 | 2 | 73.55 | 0.21 | 2 |
| G019823 | 93.48 | 2.48 | 2 | 4.04 | 1.94 | 2 | 79.65 | 0.80 | 2 | 24.45 | 6.01 | 2 |
| G019824 | 95.90 | 0.76 | 2 | 6.32 | 1.92 | 2 | 89.11 | 1.03 | 2 | 74.75 | 3.18 | 2 |
| G019825 | 29.68 | 7.06 | 2 | 56.10 | 0.57 | 2 | 39.49 | 6.14 | 2 | 66.20 | 3.54 | 2 |
| G019826 | 92.62 | 1.03 | 2 | 3.74 | 1.05 | 2 | 69.37 | 5.37 | 2 | 61.70 | 0.42 | 2 |
| G019827 | 39.32 | 4.26 | 2 | 54.80 | 2.55 | 2 | 48.52 | 0.86 | 2 | 38.15 | 1.20 | 2 |
| G019828 | 87.90 | 3.26 | 2 | 9.98 | 1.16 | 2 | 80.25 | 0.57 | 2 | 7.40 | 2.33 | 2 |
| G019829 | 31.95 | 2.81 | 2 | 63.40 | 1.98 | 2 | 76.10 | 2.57 | 2 | 14.50 | 2.69 | 2 |
| G019830 | 81.01 | 6.21 | 2 | 16.45 | 3.32 | 2 | 83.57 | 1.78 | 2 | 4.29 | 1.12 | 2 |
| G019831 | 98.29 | 0.30 | 2 | 0.91 | 0.25 | 2 | 71.43 | 0.65 | 2 | 2.05 | 0.84 | 2 |
| G019832 | 62.85 | 1.73 | 2 | 34.70 | 3.54 | 2 | 90.87 | 2.45 | 2 | 71.05 | 6.01 | 2 |
| G019833 | 92.66 | 0.94 | 2 | 4.28 | 0.82 | 2 | 75.96 | 0.45 | 2 | 18.40 | 2.26 | 2 |
| G019834 | 94.43 | 0.37 | 2 | 2.75 | 0.76 | 2 | 76.23 | 0.91 | 2 | 69.00 | 2.83 | 2 |
| G019835 | 42.83 | n.a. | 1 | 49.95 | 5.73 | 2 | 51.27 | 8.38 | 2 | 43.95 | 6.72 | 2 |
| G019836 | No data | | | 46.05 | 5.02 | 2 | 31.44 | 6.72 | 2 | 75.10 | 0.00 | 2 |
| G019837 | 43.86 | 6.82 | 2 | 49.85 | 5.44 | 2 | 63.03 | 1.17 | 2 | 51.50 | 1.70 | 2 |
| G019838 | 75.85 | 0.40 | 2 | 24.25 | 0.64 | 2 | 74.87 | 1.14 | 2 | 19.05 | 2.62 | 2 |
| G019839 | 97.44 | n.a.. | 1 | 1.82 | 0.21 | 2 | 69.11 | 4.60 | 2 | 40.55 | 2.05 | 2 |
| G019840 | 59.58 | 4.30 | 2 | 37.90 | 0.85 | 2 | 47.06 | 4.04 | 2 | 73.05 | 1.06 | 2 |
| G019841 | 96.14 | n.a. | 1 | 3.60 | 1.68 | 2 | 69.28 | 2.55 | 2 | 27.15 | 2.33 | 2 |
| G019842 | 33.72 | 6.77 | 2 | 58.65 | 2.05 | 2 | 29.32 | 2.31 | 2 | 71.50 | 3.82 | 2 |
| G019843 | 6.02 | 0.04 | 2 | 73.15 | 0.49 | 2 | 20.85 | 1.36 | 2 | 70.75 | 0.35 | 2 |
| G019844 | 85.26 | 12.45 | 2 | 6.30 | 0.47 | 2 | 76.89 | 3.63 | 2 | 39.45 | 3.75 | 2 |
| G019845 | 36.76 | 2.44 | 2 | 55.25 | 3.18 | 2 | 62.90 | 1.02 | 2 | 60.15 | 2.62 | 2 |
| G019846 | 25.85 | 4.33 | 2 | 64.80 | 2.69 | 2 | 57.55 | 1.80 | 2 | 63.95 | 4.88 | 2 |
| G019847 | 58.00 | 5.06 | 2 | 37.85 | 2.19 | 2 | 71.58 | 0.74 | 2 | 42.55 | 5.16 | 2 |
| G019848 | 47.39 | 6.18 | 2 | 46.90 | 5.09 | 2 | 71.78 | 4.09 | 2 | 67.15 | 3.32 | 2 |

No data means sample had technical fail in all replicates.
N.A. is used when only one replicate was available and thus it was not applicable to calculate a standard deviation.

### Example 21. Base Editing with Nme2Cas9 Base Editor and Chemically Modified sgRNA in HepG2 Cells

[0668] Base editor constructs comprising an APOBEC3A deaminase domain fused to Nme2Cas9 D16A nickase were tested for base conversion efficiency with various guide designs in HepG2 cells.

[0669] HepG2 cells constitutively overexpress solute carrier family 10 member 1 (SLC10A1) (HepG2-NTCP, Seeger et al. Mol Ther Nucleic Acids. 2014 Dec.; 3(12): e216) were thawed and resuspended in Dulbecco's Modified Eagle's Medium (DMEM) supplemented with 10% Fetal Bovine Serum (FBS) (Media Y) followed by centrifugation. The supernatant was discarded and the cells were resuspended in Media Y and plated at a density of 25,000 cells per well in a 96-well collagen coated plate (Corning, Cat. 354407) in 100 uL of Media Y.

[0670] Nme2Cas9 base editor mRNAs were prepared by in vitro transcription essentially as described in Example 1 from plasmids encoding SEQ ID No: 304 (2XNLS N-terminal, lxC-terminal NLS Nme2Cas9 base editor), SEQ ID No: 310 (2XNLS N-terminal, NLS Nme2Cas9 base editor), and SEQ ID No: 301 (1×C-term NLS Nme2Cas9 base editor). SpyCas9 mRNA and uracil glycosylase inhibitor (UGI) mRNA (SEQ ID No: 34) were transcribed from plasmids using the same method.

[0671] Chemically modified NmeCas9 sgRNAs targeted to NTCP, with different PAM sequences, (G020927, G020928) or VEGF (G020073) and SpyCas9 sgRNA targeted to NTCP (G020929) were synthesized using routine methods.

[0672] The tested NmeCas9 sgRNAs targeting NTCP include a 24 nucleotide guide sequence (as represented by N) and a guide scaffold as follows: mN*mNNNNNNNNmNNNmNNNNNNNNNNNNmGUUGmUmAmGmCUCCCmUmGm AmAmAmCmCGUUmGmCUAmCAAU*AAGmGmCCmGmUmCmGmAmAmAmGmAm UGUGCmCGCmAmAmCmGCUCUmGmCCmUmUmCmUGmGCmAmUC*mG*mU*mU (SEQ ID NO: 522), where A, C, G, U, and N are adenine, cytosine, guanine, uracil, and any ribonucleotide, respectively, unless otherwise indicated. An m is indicative of a 2′O-methyl modification, and an * is indicative of a phosphorothioate linkage between the nucleotides. Unmodified and modified versions of the guides are provided in Table 5C. Guide RNA, editor mRNA, and UGI mRNA were mixed at a 1:1:1 weight ratio with premixed transfection reagent containing Lipid A, cholesterol, DSPC, and PEG2k-DMG in a 50:38:9:3 molar ratio, respectively. Reagents were combined at a lipid amine to RNA phosphate (N:P) molar ratio of about 6.0. RNA-lipid mixture was mixed approximately 1:1 with 10% FBS media and incubated for 10 minutes. Post-incubation, the cells were treated with the RNA-lipid mixture in an 8-point, 2-fold serial dilution starting at 400 ng total editor RNA per well.

[0673] At 72 hours post-treatment, cells were lysed for NGS analysis as provided in Example 1.

[0674] Dose response of editing efficiency to guide concentration was performed in triplicate. Table 55 shows mean editing percentages calculated [at each guide concentration and a calculated EC50 value. The target site in VEGFA is prone to indel formation due to high GC content. All editor miRNAs achieved the same maximum C to T editing. There were slight differences in EC50 where SEQ ID No: 310 mRNA outperformed SEQ ID No: 304 and SEQ ID No: 301.

TABLE 55
Mean editing percentages in HepG2-NTCP cells at VEGFA locus (G020073)
and Nme2Cas9 base editor

| | Nme-base | C-to-T % | | | | C-to-A/G % | | | Indel % | | |
|---|---|---|---|---|---|---|---|---|---|---|---|
| mRNA | editor (ng) | Mean | SD | n | EC50 | Mean | SD | n | Mean | SD | n |
| SEQ ID No: | 0 | 0.20 | 0.14 | 2 | 6.86 | 0.80 | 0.00 | 2 | 0.70 | 0.14 | 2 |
| 304 | 6.25 | 36.05 | 1.63 | 2 | | 2.30 | 0.28 | 2 | 14.25 | 0.21 | 2 |
| | 12.5 | 49.70 | 1.13 | 2 | | 2.95 | 0.49 | 2 | 16.35 | 1.06 | 2 |
| | 25 | 57.60 | 0.42 | 2 | | 2.75 | 0.07 | 2 | 17.45 | 0.21 | 2 |
| | 50 | 67.15 | 1.34 | 2 | | 2.65 | 0.07 | 2 | 17.90 | 0.14 | 2 |
| | 100 | 70.50 | 0.99 | 2 | | 2.65 | 0.07 | 2 | 18.80 | 0.28 | 2 |
| | 200 | 72.75 | 0.49 | 2 | | 2.90 | 0.57 | 2 | 18.75 | 0.49 | 2 |
| | 400 | 72.00 | 0.14 | 2 | | 3.10 | 0.14 | 2 | 20.40 | 0.99 | 2 |
| SEQ ID No: | 0 | 0.50 | 0.00 | 1 | 3.86 | 1.00 | 0.00 | 1 | 0.60 | 0.00 | 1 |
| 310 | 6.25 | 49.60 | 3.25 | 2 | | 2.10 | 0.14 | 2 | 14.05 | 0.21 | 2 |
| | 12.5 | 57.05 | 0.78 | 2 | | 2.50 | 0.42 | 2 | 16.50 | 0.14 | 2 |
| | 25 | 66.95 | 0.49 | 2 | | 2.40 | 0.00 | 2 | 16.25 | 0.21 | 2 |
| | 50 | 71.45 | 0.35 | 2 | | 2.40 | 0.00 | 2 | 17.25 | 0.07 | 2 |
| | 100 | 71.60 | 0.85 | 2 | | 2.55 | 0.35 | 2 | 17.90 | 0.14 | 2 |
| | 200 | 73.70 | 0.28 | 2 | | 2.65 | 0.07 | 2 | 19.00 | 0.28 | 2 |
| | 400 | 73.80 | 0.14 | 2 | | 3.05 | 0.35 | 2 | 18.70 | 0.42 | 2 |
| SEQ ID No: | 0 | 0.55 | 0.49 | 2 | 4.84 | 1.05 | 0.21 | 2 | 0.55 | 0.07 | 2 |
| 301 | 6.25 | 45.55 | 0.21 | 2 | | 2.60 | 0.28 | 2 | 17.15 | 0.64 | 2 |
| | 12.5 | 56.40 | 1.84 | 2 | | 2.80 | 0.00 | 2 | 19.40 | 0.14 | 2 |
| | 25 | 64.95 | 1.06 | 2 | | 3.15 | 0.35 | 2 | 19.40 | 1.70 | 2 |
| | 50 | 70.70 | 0.28 | 2 | | 3.25 | 0.21 | 2 | 20.00 | 0.71 | 2 |
| | 100 | 72.20 | 2.83 | 2 | | 2.75 | 0.21 | 2 | 19.80 | 1.56 | 2 |
| | 200 | 70.90 | 0.99 | 2 | | 3.15 | 0.35 | 2 | 19.70 | 0.85 | 2 |
| | 400 | 71.80 | 0.14 | 2 | | 3.45 | 0.21 | 2 | 20.95 | 0.35 | 2 |

### Example 22. Base Editing with Chemically Modified sgRNA in PMH

[0675] Base editor constructs comprising an APOBEC3A deaminase domain fused to Nme2Cas9 nickase were tested for base conversion efficiency with various guide designs in primary mouse hepatocytes (PMH).

[0676] PMH (In Vitro ADMET Laboratories, cat #MC148) were thawed and resuspended in 50 mL Cryopreserved Hepatocyte Recovery Media (CHRM) (Invitrogen, CM7000) followed by centrifugation. Cells were resuspended in hepatocyte medium with plating supplements: Williams' E Medium Plating Supplements with FBS content (Gibco, Cat. A13450). Cells were pelleted by centrifugation, resuspended in media and plated at a density of 20,000 cells/well on Bio-coat collagen I coated 96-well plates (Corning #354407). Plated cells were allowed to settle and adhere for 4-6 hours in a tissue culture incubator at 37° C. and 5% CO2 atmosphere. After incubation cells were checked for monolayer formation and were washed once and plated with 100 uL hepatocyte maintenance medium: Williams' E Medium (Gibco, Cat. A12176-01) plus supplement pack (Gibco, Cat. CM3000).

[0677] Nme2Cas9 base editor mRNAs, SEQ ID No: 304, SEQ ID No: 310, and SEQ ID No: 301; and uracil glycosylase inhibitor (UGI) mRNA (SEQ ID No: 34) were prepared as described in Example 1 and paired with a series of chemically modified sgRNA targeted to mouse TTR and screened at a single dose of 128 ng of base editor mRNA. At 72 hours post-treatment, cells were lysed for NGS analysis as provided in Example 1. The mean editing of representative guides (ratio of edit types) are shown in Table 56.

TABLE 56
Mean editing percentages in PMH cells using modified gRNAs targeting the
TTR locus and an Nme2Cas9 base editor. “n/a” means SD is not applicable
when only 1 replicate is reported.

| | | C-to-T % | | | C-to-A/G % | | | Indel % | | |
|---|---|---|---|---|---|---|---|---|---|---|
| mRNA | Guide | Mean | SD | N | Mean | SD | N | Mean | SD | N |
| SEQ ID No: | G021237 | 69.00 | 5.94 | 2 | 3.65 | 1.63 | 2 | 9.00 | 3.39 | 2 |
| 304 | G021249 | 47.15 | 2.33 | 2 | 1.20 | 0.14 | 2 | 1.45 | 1.34 | 2 |
| | G021321 | 7.25 | 0.92 | 2 | 0.25 | 0.21 | 2 | 91.25 | 0.92 | 2 |
| SEQ ID No: | G021237 | 76.75 | 1.34 | 2 | 4.35 | 1.48 | 2 | 7.95 | 1.34 | 2 |
| 310 | G021249 | 54.05 | 4.17 | 2 | 1.20 | 0.28 | 2 | 1.60 | 0.42 | 2 |
| | G021321 | 0.50 | n/a | 1 | 0.10 | n/a | 1 | 99.00 | n/a | 1 |
| SEQ ID No: | G021237 | 73.55 | 5.44 | 2 | 5.15 | 2.47 | 2 | 12.50 | 1.70 | 2 |
| 301 | G021249 | 53.30 | 5.52 | 2 | 1.05 | 0.21 | 2 | 2.15 | 1.63 | 2 |
| | G021321 | 7.05 | 1.20 | 2 | 0.55 | 0.21 | 2 | 90.40 | 2.97 | 2 |

### Example 23. In Vivo Base Editing with gRNA

[0678] The editing efficiency of the modified gRNAs with different mRNAs were tested with a Nme2Cas9 base editor construct in the mouse model.

[0679] LNPs were generally prepared as described in Example 1 with a single RNA species as cargo. The LNPs used were prepared with Lipid A, cholesterol, DSPC, and PEG2k-DMG in a 50:38:9:3 molar ratio, respectively. The LNPs were formulated with a lipid amine to RNA phosphate (N:P) molar ratio of about 6. The LNPs were formulated as described in Example 1, except that each component, guide RNA, or mRNA was formulated individually into an LNP, and the LNP were mixed prior to administration as described in Table 57. For Nme2Cas9 and Nme2Cas9 base editor samples, LNPs were mixed at a ratio of 2:1 by weight of gRNA to editor mRNA cargo. For SpyCas9 base editor samples, LNPs were mixed at a ratio of 1:2 by weight of gRNA to editor mRNA cargo. Dose, as indicated in Table 57 and FIG. 38, is calculated based on the combined RNA weight of gRNA and editor mRNA. Base editor samples were treated with an additional 0.03 mpk of UGI mRNA. Transport and storage solution (TSS) used in LNP preparation was dosed in the experiment as a vehicle-only negative control.

[0680] The tested NmeCas9 gRNA (G021844) including linkers has the following modification pattern of (N)₂₄

(SEQ ID NO: 519)
GUUGmUmAmGmCUCCCmUmUmC(L1)mGmAmCmCGUUmGmCUAmCAAU*
AAGmGmCCmGmUmC(L1)mGmAmUGUGCmCGmCAAmCGCUCUmGmCC
(L1)GGCAUCG*mU*mU,

where A, C, G, U, and N are adenine, cytosine, guanine, uracil, and any ribonucleotide, respectively, unless otherwise indicated. An m is indicative of a 2′O-methyl modification, and an * is indicative of a phosphorothioate linkage between the nucleotides. Unmodified and modified versions of the guides are provided in Table 5C (Sequence Table).

[0681] CD-1 female mice, ranging 6-10 weeks of age were used in each study involving mice (n=5 per group, except TSS control n=4). Formulations were administered intravenously via tail vein injection according to the doses listed in Table 57. Animals were periodically observed for adverse effects for at least 24 hours post-dose. Six days after treatment, animals were euthanized by cardiac puncture under isoflurane anesthesia; liver tissue were collected for downstream analysis. Liver punches weighing between 5 and 15 mg were collected for isolation of genomic DNA and total RNA. Genomic DNA was extracted using a DNA isolation kit (ZymoResearch, D3010) and samples were analyzed with NGS sequencing as described in Example 1. The editing efficiency for LNPs containing the indicated gRNAs are shown in Table 57 and illustrated in FIG. 38.

TABLE 57
Mean percent editing in mouse liver.

| | Dose | C-to-T % | | | C-to-A/G % | | | Indel % | | |
|---|---|---|---|---|---|---|---|---|---|---|
| Sample | (mg/kg) | Mean | SD | n | Mean | SD | n | Mean | SD | n |
| TSS | 0 | 0.00 | 0.00 | 4 | 0.10 | 0.00 | 4 | 0.08 | 0.05 | 4 |
| SEQ ID NO: 340 + G021844 | 0.03 | 0.00 | 0.00 | 5 | 0.08 | 0.04 | 5 | 40.88 | 14.16 | 5 |
| (Nme2Cas9 + pgRNA) | 0.1 | 0.00 | 0.00 | 5 | 0.02 | 0.04 | 5 | 66.02 | 5.01 | 5 |
| SEQ ID No: 310 + SEQ ID | 0.03 | 25.60 | 5.28 | 5 | 3.50 | 0.76 | 5 | 11.14 | 2.18 | 5 |
| No: 34 + G021844 | | | | | | | | | | |
| (Nme2Cas9 base editor + | 0.1 | 46.34 | 1.53 | 5 | 5.74 | 0.33 | 5 | 13.52 | 0.90 | 5 |
| UGI + pgRNA) | | | | | | | | | | |
| SEQ ID No: 1 + SEQ ID | 0.03 | 9.28 | 2.82 | 5 | 0.94 | 0.54 | 5 | 7.34 | 1.61 | 5 |
| No: 34 + G000502 | | | | | | | | | | |
| (Spy BC22n + UGI + | 0.1 | 30.72 | 8.51 | 5 | 2.86 | 0.23 | 5 | 15.60 | 2.58 | 5 |
| sgRNA) | | | | | | | | | | |

### Example 24. C to T Deaminase Base Editing Screen

[0682] Candidate deamiinase-Cas9 fusion constructs were evaluated on efficiency of C to T conversion activity. All experimental deaminase C to T conversion activity were compared against construct BC27 encoding BE3 (Komor A C, Kim Y B, Packer M S, Zuris J A, Liu D R Programmable editing of a target base in genomic DNA without double-stranded DNA cleavage. Nature. 2016; 533(7603):420-424.) In total, 56 deaminase-Cas9 fusion constructs as mentioned in Table 58 were each evaluated in triplicate against sg005883 in a single experiment. The constructs were designed and methods performed as described in Example 1A.

[0683] Table 59 and FIG. 39 shows the percent of total reads containing at least 1 cytosine to thymiidine conversion across all base editor constructs tested.

TABLE 58
Deaminases tested in base editor activity screens

| | | | | Amino |
|---|---|---|---|---|
| Base | | | | acid |
| Editor | UniProt for | | | sequence |
| Construct | Deaminase | Deaminase | Deaminase | (SEQ ID |
| ID | Domain | Gene Name | Species | NO) |
| BC01 | A0AON4SVL6 | Apobec1 | M. musculus | 960 |
| BC02 | A0AON4SW85 | Apobec1 | M. musculus | 961 |
| BC03 | A0QT11 | cdd | M. smegmatis | 962 |
| BC04 | Q3JJN0 | cdd | B. pseudomallei | 963 |
| BC05 | B2HDU6 | cdd | M. marinum | 964 |
| BC06 | Q81LT6 | cdd2 | B. anthracis | 965 |
| BC07 | P9WPH3 | cdd | M. tuberculosis | 966 |
| BC08 | A0A0H3MRL9 | cdd | M. leprae | 967 |
| BC09 | P19079 | cdd | B. subtilis | 968 |
| BC10 | Q06549 | CDD1 | S. cerevisiae | 969 |
| BC11 | Q81Y61 | GBAA | B. anthracis | 970 |
| BC12 | P56389 | Cda Cdd | M. musculus | 971 |
| BC13 | P32320 | CDA | H. sapiens | 972 |
| BC14 | Q12178 | FCY1 | S. cerevisiae | 973 |
| BC15 | Q22922 | cdd | C. elegans | 974 |
| BC16 | Q20628 | cdd | C. elegans | 975 |
| BC17 | Q9NRW3 | APOBEC3C | H. sapiens | 976 |
| BC18 | A0A087WX48 | Apobec3DE | H. sapiens | 977 |
| BC19 | Q82Y41 | NE0047 | N. europaea | 978 |
| BC20 | Q9GZX7 | AICDA AID | H. sapiens | 979 |
| BC21 | Q9WVE0 | Aicda Aid | M. musculus | 980 |
| BC22 | P31941 | APOBEC3A | H. sapiens | 40 |
| BC23 | Q6NTF7 | APOBEC3H | H. sapiens | 981 |
| BC24 | Q9Y235 | APOBEC2 | H. sapiens | 982 |
| BC25 | Q9WV35 | Apobec2 | M. musculus | 983 |
| BC26 | P51908 | Apobec1 | M. musculus | 984 |
| BC27 | P38483 | Apobec1 | R. norvegicus | 41 |
| BC28 | Q9TUI7 | APOBEC1 | M. domestica | 985 |
| BC29 | P41238 | APOBEC1 | H. sapiens | 986 |
| BC30 | P47855 | APOBEC1 | O. cuniculus | 987 |
| BC31 | Q8TWU6 | MK0935 | M. kandleri | 988 |
| BC32 | P0ABF6 | cdd | E. coli | 989 |
| BC33 | Q9KSM5 | cdd | V. cholerae | 990 |
| BC34 | Q3TI69 | Apobec3 | M. musculus | 991 |
| BC35 | 065896 | CDA1 | A. thalia | 992 |
| BC36 | Q7YR23 | APOBEC3G | M. mulatta | 993 |
| BC37 | Q8IUX4 | APOBEC3F | H. sapiens | 994 |
| BC38 | Q7YR25 | APOBEC3G | C. aethiops | 995 |
| BC39 | Q9UH17 | APOBEC3B | H. sapiens | 996 |
| BC40 | M1GSK9 | APOBEC3G | M. mulatta | 997 |
| BC41 | Q9HC16 | APOBEC3G | H. sapiens | 998 |
| BC42 | Q7YR24 | APOBEC3G | P. troglodytes | 999 |
| BC43 | Q96AK3 | APOBEC3D | H. sapiens | 1000 |
| BC44 | H3BJQ3 | Apobec3 | M. musculus | 1001 |
| BC45 | H3BKE5 | Apobec3 | M. musculus | 1002 |
| BC46 | E9QMH1 | Apobec3 | M. musculus | 1003 |
| BC47 | Q99J72 | Apobec3 | M. musculus | 1004 |
| BC48 | H3BJ44 | Apobec3 | M. musculus | 1005 |
| BC49 | H3BJL0 | Apobec3 | M. musculus | 1006 |
| BC50 | G3UW39 | Cdadc1 | M. musculus | 1007 |
| BC51 | P25524 | codA | E. coli | 1008 |
| BC52 | Q19Q52 | APOBEC3H | M. mulatta | 1009 |
| BC53 | Q97MB6 | CA_C0282 | C. acetobutylicum | 1010 |
| BC54 | A0A0EICHI1 | KPNJ1 | K. pneumoniae | 1011 |
| BC55 | P46087 | NOP2 | H. sapiens | 1012 |
| BC56 | Q08J23 | NSUN2 | H. sapiens | 1013 |

TABLE 59
Percent of total reads containing at least 1 cytosine to
thymidine conversion for sg005883. (n = 3)

| Construct | Mean | SD |
|---|---|---|
| 1XNLS Cas9 | 0.0 | 0.1 |
| 3XNLS Cas9 | 0.0 | 0.0 |
| BC01 | 1.5 | 0.3 |
| BC02 | 1.3 | 0.6 |
| BC03 | 1.4 | 0.5 |
| BC04 | 1.2 | 0.5 |
| BC05 | 1.9 | 0.2 |
| BC06 | 1.0 | 0.4 |
| BC07 | 1.7 | 0.3 |
| BC08 | 1.8 | 0.3 |
| BC09 | 1.8 | 0.5 |
| BC10 | 2.2 | 0.8 |
| BC11 | 1.8 | 0.4 |
| BC12 | 2.0 | 0.5 |
| BC13 | 1.0 | 0.2 |
| BC14 | 2.1 | 0.6 |
| BC15 | 0.9 | 0.2 |
| BC16 | 1.6 | 0.3 |
| BC17 | 10.7 | 1.5 |
| BC18 | 6.0 | 1.0 |
| BC18 | 6.0 | 1.0 |
| BC19 | 2.3 | 0.3 |
| BC20 | 17.9 | 3.5 |
| BC21 | 27.8 | 5.3 |
| BC22 | 46.0 | 7.7 |
| BC23 | 2.5 | 0.7 |
| BC24 | 1.7 | 0.2 |
| BC25 | 1.5 | 0.5 |
| BC26 | 42.1 | 1.5 |
| BC27 | 40.8 | 5.2 |
| BC28 | 42.9 | 5.0 |
| BC29 | 20.3 | 1.0 |
| BC30 | 23.7 | 5.2 |
| BC31 | 1.9 | 0.2 |
| BC32 | 1.9 | 0.4 |
| BC33 | 2.2 | 0.6 |
| BC34 | 2.5 | 0.7 |
| BC35 | 1.4 | 0.5 |
| BC36 | 53.2 | 5.1 |
| BC37 | 14.7 | 3.2 |
| BC38 | 26.8 | 1.5 |
| BC39 | 50.0 | 7.4 |
| BC40 | 31.9 | 3.3 |
| BC41 | 35.0 | 9.1 |
| BC42 | 49.0 | 6.9 |
| BC43 | 9.8 | 2.3 |
| BC44 | 12.8 | 4.8 |
| BC45 | 22.7 | 5.2 |
| BC46 | 14.6 | 6.0 |
| BC47 | 14.8 | 4.6 |
| BC48 | 31.5 | 4.2 |
| BC49 | 13.0 | 4.3 |
| BC50 | 1.7 | 0.3 |
| BC51 | 1.1 | 0.2 |
| BC52 | 8.0 | 0.5 |
| BC53 | 1.1 | 0.2 |
| BC54 | 1.7 | 0.5 |
| BC55 | 2.5 | 0.9 |
| BC56 | 1.7 | 0.6 |
| GFP | 0.2 | 0.1 |

### Example 25. Base Editing by Constructs with Various Linkers when Expressed by Plasmid in U-2OS Cells

[0684] A set of sixty-eight amino acid linkers listed in Table 60 encompassing various lengths and flexibilities were encoded into the region between the N-terminal cytosine deaminase and C-terminal Cas9 nickase of expression plasmid BC27 as mentioned in Example 1A. Selected base editor constructs described in Table 58 were redesigned with the substitution of the XTEN linker between the cytosine deaminase domain and the Spy Cas9 nickase domain with a linker from Table 60. The BC27 linker screen was conducted using sg001373 with target sequence UCCCUGGCUGAGGAUCCCCA (SEQ ID NO: 157). The other 10 deaminase domain linker screens were conducted using sg005883 with target sequence CCCCCCGCCGUGUUUGUGGG (SEQ ID NO: 159)

TABLE 60
Sixty-eight amino acid linkers tested in linker activity screens.

| Linker | |
|---|---|
| ID | Linker amino acid sequence |
| L001 | SGSETPGTSESATPES (SEQ ID NO: 46) |
| (XTEN | |
| control) | |
| L002 | GGS (SEQ ID NO: 211) |
| L003 | GGGGS (SEQ ID NO: 212) |
| L004 | EAAAK (SEQ ID NO: 213) |
| L005 | SEGSA (SEQ ID NO: 214) |
| L006 | SEGSAGTST (SEQ ID NO: 215) |
| L007 | GGGGSGGGGS (SEQ ID NO: 216) |
| L008 | GGGGSEAAAK (SEQ ID NO: 217) |
| L009 | EAAAKGGGGS (SEQ ID NO: 218) |
| L010 | EAAAKEAAAK (SEQ ID NO: 219) |
| L011 | SEGSAGTSTESEGSA (SEQ ID NO: 220) |
| L012 | GGGGSGGGGSGGGGS (SEQ ID NO: 221) |
| L013 | GGGGSGGGGSEAAAK (SEQ ID NO: 222) |
| L014 | GGGGSEAAAKGGGGS (SEQ ID NO: 223) |
| L015 | GGGGSEAAAKEAAAK (SEQ ID NO: 49) |
| L016 | EAAAKGGGGSGGGGS (SEQ ID NO: 50) |
| L017 | EAAAKGGGGSEAAAK (SEQ ID NO: 224) |
| L018 | EAAAKEAAAKGGGGS (SEQ ID NO: 225) |
| L019 | EAAAKEAAAKEAAAK (SEQ ID NO: 51) |
| L020 | SEGSAGTSTESEGSAGTSTE (SEQ ID NO: 226) |
| L021 | GGGGSGGGGSGGGGSGGGGS (SEQ ID NO: 52) |
| L022 | GGGGSGGGGSGGGGSEAAAK (SEQ ID NO: 227) |
| L023 | GGGGSGGGGSEAAAKGGGGS (SEQ ID NO: 228) |
| L024 | GGGGSGGGGSEAAAKEAAAK (SEQ ID NO: 53) |
| L025 | GGGGSEAAAKGGGGSGGGGS (SEQ ID NO: 54) |
| L026 | GGGGSEAAAKGGGGSEAAAK (SEQ ID NO: 229) |
| L027 | GGGGSEAAAKEAAAKGGGGS (SEQ ID NO: 230) |
| L028 | GGGGSEAAAKEAAAKEAAAK (SEQ ID NO: 231) |
| L029 | EAAAKGGGGSGGGGSGGGGS (SEQ ID NO: 232) |
| L030 | EAAAKGGGGSGGGGSEAAAK (SEQ ID NO: 233) |
| L031 | EAAAKGGGGSEAAAKGGGGS (SEQ ID NO: 234) |
| L032 | EAAAKGGGGSEAAAKEAAAK (SEQ ID NO: 235) |
| L033 | EAAAKEAAAKGGGGSGGGGS (SEQ ID NO: 236) |
| L034 | EAAAKEAAAKGGGGSEAAAK (SEQ ID NO: 237) |
| L035 | EAAAKEAAAKEAAAKGGGGS (SEQ ID NO: 238) |
| L036 | EAAAKEAAAKEAAAKEAAAK (SEQ ID NO: 56) |
| L037 | SEGSAGTSTESEGSAGTSTESEGSA (SEQ ID NO: 239) |
| L038 | GGGGSGGGGSGGGGSGGGGSGGGGS (SEQ ID NO: 240) |
| L039 | GGGGSGGGGSGGGGSGGGGSEAAAK (SEQ ID NO: 241) |
| L040 | GGGGGGGGSGGGGSEAAAKGGGGS (SEQ ID NO: 242) |
| L041 | GGGGSGGGGSGGGGSEAAAKEAAAK (SEQ ID NO: 243) |
| L042 | GGGGSGGGGSEAAAKGGGGSGGGGS (SEQ ID NO: 244) |
| L043 | GGGGSGGGGSEAAAKGGGGSEAAAK (SEQ ID NO: 245) |
| L044 | GGGGSGGGGSEAAAKEAAAKGGGGS (SEQ ID NO: 246) |
| L045 | GGGGSGGGGSEAAAKEAAAKEAAAK (SEQ ID NO: 247) |
| L046 | GGGGSEAAAKGGGGSGGGGSGGGGS (SEQ ID NO: 248) |
| L047 | GGGGSEAAAKGGGGSGGGGSEAAAK (SEQ ID NO: 249) |
| L048 | GGGGSEAAAKGGGGSEAAAKGGGGS (SEQ ID NO: 250) |
| L049 | GGGGSEAAAKGGGGSEAAAKEAAAK (SEQ ID NO: 251) |
| L050 | GGGGSEAAAKEAAAKGGGGSGGGGS (SEQ ID NO: 252) |
| L051 | GGGGSEAAAKEAAAKGGGGSEAAAK (SEQ ID NO: 57) |
| L052 | GGGGSEAAAKEAAAKEAAAKGGGGS (SEQ ID NO: 253) |
| L053 | GGGGSEAAAKEAAAKEAAAKEAAAK (SEQ ID NO: 254) |
| L054 | EAAAKGGGGSGGGGSGGGGSGGGGS (SEQ ID NO: 255) |
| L055 | EAAAKGGGGSGGGGSGGGGSEAAAK (SEQ ID NO: 256) |
| L056 | EAAAKGGGGSGGGGSEAAAKGGGGS (SEQ ID NO: 257) |
| L057 | EAAAKGGGGSGGGGSEAAAKEAAAK (SEQ ID NO: 258) |
| L058 | EAAAKGGGGSEAAAKGGGGSGGGGS (SEQ ID NO: 259) |
| L059 | EAAAKGGGGSEAAAKGGGGSEAAAK (SEQ ID NO: 260) |
| L060 | EAAAKGGGGSEAAAKEAAAKGGGGS (SEQ ID NO: 261) |
| L061 | EAAAKGGGGSEAAAKEAAAKEAAAK (SEQ ID NO: 262) |
| L062 | EAAAKEAAAKGGGGSGGGGSGGGGS (SEQ ID NO: 58) |
| L063 | EAAAKEAAAKGGGGSGGGGSEAAAK (SEQ ID NO: 59) |
| L064 | EAAAKEAAAKGGGGSEAAAKGGGGS (SEQ ID NO: 263) |
| L065 | EAAAKEAAAKGGGGSEAAAKEAAAK (SEQ ID NO: 264) |
| L066 | EAAAKEAAAKEAAAKGGGGSGGGGS (SEQ ID NO: 55) |
| L067 | EAAAKEAAAKEAAAKGGGGSEAAAK (SEQ ID NO: 265) |
| L068 | EAAAKEAAAKEAAAKEAAAKGGGGS (SEQ ID NO: 266) |
| L069 | EAAAKEAAAKEAAAKEAAAKEAAAK (SEQ ID NO: 267) |

[0685] Plasmid A, uses a pUC19 backbone (GenBank® Accession Number U47119), expresses an S. pyogenes single-guide RNA (sgRNA) from a U6 promoter. Plasmid B, called pCI, expresses base editor constructs from a CMV promoter which are comprised of the candidate deamiinase fused to S. pyogenes-D10A-Cas9 by an experimental linker which is subsequently fused to one copy of UGI and one copy of SV40 NLS. U-2OS cells growing in Dulbecco's Modified Eagle's Medium (DMEM) supplemented with 10% Fetal Bovine Serum (FBS) in 96-well plates were transfected using Mirus TransIT-X2® with 100 ng each of plasmid A and plasmid B. 100 uL of fresh media was added 24 hours after initial transfection. After an additional 48 hours, the media was removed and the cells were lysed with QuickExtract™ DNA Extraction Solution (Lucigen, Cat. QE09050). Table 61A and 61B lists the percent of total reads containing at least 1 cytosine to thymidine conversion across all deaminase domains tested and representative data is shown in FIGS. 40A-40K.

TABLE 61A
Percent of total reads containing at least 1 cytosine to thymidine (% C to T) conversion

| | BC18 | | | BC22 | | | BC27 | | | BC28 | | | BC29 | | | BC30 | | |
|---|---|---|---|---|---|---|---|---|---|---|---|---|---|---|---|---|---|---|
| Linker | Mean | SD | N | Mean | SD | N | Mean | SD | N | Mean | SD | N | Mean | SD | N | Mean | SD | N |
| L001 | 2.07 | 0.90 | 3 | 50.50 | 2.36 | 3 | 13.47 | 2.42 | 3 | 43.15 | 8.56 | 2 | 9.70 | 3.97 | 3 | 12.50 | 2.94 | 3 |
| (XTEN | | | | | | | | | | | | | | | | | | |
| control) | | | | | | | | | | | | | | | | | | |
| L002 | 0.53 | 0.19 | 3 | 57.43 | 9.03 | 3 | 5.70 | 1.31 | 3 | 19.30 | 0.42 | 2 | 5.03 | 2.14 | 3 | 7.25 | 1.10 | 3 |
| L003 | 1.10 | 0.57 | 3 | 54.37 | 12.74 | 3 | 6.87 | 2.15 | 3 | 6.80 | 2.12 | 2 | 4.20 | 1.51 | 3 | 3.30 | 0.87 | 3 |
| L004 | 0.40 | 0.08 | 3 | 30.97 | 0.65 | 3 | 6.07 | 0.64 | 3 | 34.65 | 9.40 | 2 | 3.93 | 1.43 | 3 | 11.55 | 1.18 | 3 |
| L005 | 0.93 | 0.54 | 3 | 29.30 | 2.41 | 3 | 8.07 | 1.10 | 3 | 17.50 | 3.25 | 2 | 3.60 | 1.47 | 3 | 10.45 | 2.14 | 3 |
| L006 | 1.50 | 0.96 | 3 | 57.70 | 6.70 | 3 | 8.03 | 3.06 | 3 | 28.20 | 9.90 | 2 | 9.10 | 1.74 | 3 | 4.20 | 1.73 | 3 |
| L007 | 1.00 | 0.54 | 3 | 57.10 | 4.87 | 3 | 5.40 | 1.40 | 3 | 23.50 | 0.42 | 2 | 7.23 | 2.31 | 3 | 11.05 | 2.36 | 3 |
| L008 | 1.87 | 1.04 | 3 | 46.07 | 0.74 | 3 | 6.23 | 1.86 | 3 | 22.85 | 6.01 | 2 | 11.00 | 2.42 | 3 | 9.55 | 1.34 | 3 |
| L009 | 1.50 | 1.20 | 3 | 58.83 | 5.76 | 3 | 12.73 | 1.93 | 3 | 22.95 | 7.71 | 2 | 5.87 | 1.27 | 3 | 2.45 | 0.95 | 3 |
| L010 | 0.70 | 0.41 | 3 | 60.83 | 6.66 | 3 | 10.03 | 1.63 | 3 | 22.60 | 10.18 | 2 | 5.97 | 1.80 | 3 | 5.00 | 1.47 | 3 |
| L011 | 1.23 | 0.78 | 3 | 53.87 | 1.56 | 3 | 10.70 | 2.61 | 3 | 40.70 | 3.82 | 2 | 12.37 | 4.82 | 3 | 3.15 | 0.85 | 3 |
| L012 | 0.73 | 0.25 | 3 | 49.30 | 4.60 | 3 | 7.97 | 0.84 | 3 | 41.85 | 1.34 | 2 | 6.87 | 2.48 | 3 | 7.45 | 1.75 | 3 |
| L013 | 1.53 | 1.11 | 3 | 53.50 | 4.95 | 3 | 8.40 | 1.85 | 3 | 32.70 | 9.62 | 2 | 13.63 | 7.80 | 3 | 2.95 | 0.45 | 3 |
| L014 | 1.60 | 1.06 | 3 | 61.13 | 2.70 | 3 | 6.83 | 1.99 | 3 | 35.85 | 6.72 | 2 | 10.80 | 2.43 | 3 | 7.65 | 1.18 | 3 |
| L015 | 0.60 | 0.28 | 3 | 57.80 | 3.47 | 3 | 6.23 | 1.17 | 3 | 37.30 | 1.27 | 2 | 14.40 | 1.82 | 3 | 6.70 | 2.08 | 3 |
| L016 | 2.03 | 1.30 | 3 | 59.23 | 4.37 | 3 | 9.97 | 0.81 | 3 | 30.95 | 7.14 | 2 | 4.00 | 1.15 | 3 | 7.85 | 1.97 | 3 |
| L017 | 1.23 | 0.49 | 3 | 52.60 | 3.40 | 3 | 9.83 | 0.59 | 3 | 37.15 | 1.77 | 2 | 15.23 | 1.79 | 3 | 8.75 | 2.68 | 3 |
| L018 | 2.77 | 1.58 | 3 | 53.93 | 3.61 | 3 | 4.90 | 0.82 | 3 | 32.65 | 2.62 | 2 | 12.70 | 5.78 | 3 | 11.80 | 2.86 | 3 |
| L019 | 0.73 | 0.05 | 3 | 58.03 | 2.42 | 3 | 9.33 | 1.61 | 3 | 36.35 | 6.72 | 2 | 13.93 | 5.31 | 3 | 15.65 | 1.59 | 3 |
| L020 | 2.23 | 1.41 | 3 | 56.40 | 3.21 | 3 | 10.33 | 0.25 | 3 | 26.95 | 11.10 | 2 | 14.77 | 1.90 | 3 | 8.80 | 1.78 | 3 |
| L021 | 0.83 | 0.09 | 3 | 54.17 | 10.11 | 3 | 8.50 | 2.01 | 3 | 25.45 | 8.13 | 2 | 9.10 | 1.15 | 3 | 7.95 | 2.65 | 3 |
| L022 | 1.80 | 0.78 | 3 | 53.87 | 4.14 | 3 | 6.43 | 4.02 | 3 | 22.20 | 8.91 | 2 | 10.43 | 2.23 | 3 | 7.85 | 1.60 | 3 |
| L023 | 1.50 | 1.07 | 3 | 42.73 | 5.58 | 3 | 6.27 | 1.36 | 3 | 33.75 | 1.63 | 2 | 13.00 | 4.80 | 3 | 3.45 | 1.42 | 3 |
| L024 | 3.07 | 1.52 | 3 | 57.00 | 2.35 | 3 | 9.83 | 3.35 | 3 | 38.30 | 2.26 | 2 | 14.60 | 1.99 | 3 | 7.10 | 2.48 | 3 |
| L025 | 2.03 | 1.24 | 3 | 54.70 | 1.92 | 3 | 4.90 | 0.82 | 3 | 39.45 | 0.21 | 2 | 2.87 | 1.70 | 3 | 3.75 | 1.70 | 3 |
| L026 | 1.00 | 0.83 | 3 | 51.07 | 2.79 | 3 | 5.67 | 2.28 | 3 | 32.95 | 2.19 | 2 | 8.07 | 4.16 | 3 | 3.35 | 0.32 | 3 |
| L027 | 2.00 | 1.44 | 3 | 58.23 | 5.15 | 3 | 9.07 | 0.31 | 3 | 37.80 | 4.81 | 2 | 6.53 | 4.43 | 3 | 6.80 | 0.74 | 3 |
| L028 | 2.60 | 1.70 | 3 | 24.20 | 5.10 | 3 | 7.90 | 1.41 | 3 | 19.25 | 4.60 | 2 | 11.53 | 0.90 | 3 | 2.30 | 1.31 | 3 |
| L029 | 1.93 | 0.95 | 3 | 59.35 | 3.82 | 3 | 8.57 | 0.80 | 3 | 18.90 | 1.41 | 2 | 12.47 | 2.51 | 3 | 9.15 | 1.84 | 3 |
| L030 | 2.67 | 0.39 | 3 | 52.50 | 6.90 | 3 | 8.77 | 1.15 | 3 | 35.30 | 0.57 | 2 | 18.23 | 2.30 | 3 | 9.80 | 1.50 | 3 |
| L031 | 0.67 | 0.29 | 3 | 56.57 | 2.35 | 3 | 10.47 | 0.59 | 3 | 23.65 | 0.64 | 2 | 8.03 | 1.91 | 3 | 3.40 | 1.25 | 3 |
| L032 | 1.40 | 0.78 | 3 | 27.07 | 6.12 | 3 | 8.90 | 1.22 | 3 | 15.75 | 2.90 | 2 | 19.57 | 3.56 | 3 | 10.80 | 1.88 | 3 |
| L033 | 0.63 | 0.26 | 3 | 57.75 | 4.76 | 3 | 8.93 | 2.55 | 3 | 13.15 | 5.87 | 2 | 12.40 | 5.44 | 3 | 3.55 | 1.23 | 3 |
| L034 | 0.23 | 0.12 | 3 | 50.70 | 6.94 | 3 | 11.70 | 4.20 | 3 | 22.45 | 3.46 | 2 | 0.80 | 0.26 | 3 | 6.50 | 1.22 | 3 |
| L035 | 2.00 | 1.13 | 3 | 55.00 | 4.45 | 3 | 8.80 | 3.99 | 3 | 44.80 | 7.21 | 2 | 10.77 | 8.43 | 3 | 10.60 | — | 1 |
| L036 | 2.17 | 0.50 | 3 | 51.90 | 9.44 | 3 | 11.47 | 2.01 | 3 | 27.75 | 25.95 | 2 | 12.60 | 4.39 | 3 | 11.50 | 0.10 | 3 |
| L037 | 1.17 | 0.45 | 3 | 53.30 | 2.92 | 3 | 10.23 | 1.65 | 3 | 34.70 | 8.06 | 2 | 9.20 | 4.12 | 3 | 7.90 | 0.83 | 3 |
| L038 | 0.83 | 0.54 | 3 | 23.97 | 2.82 | 3 | 8.23 | 1.38 | 3 | 37.30 | 2.26 | 2 | 6.80 | 2.01 | 3 | 1.50 | 0.23 | 3 |
| L039 | 1.07 | 0.69 | 3 | 58.70 | 6.50 | 3 | 10.67 | 2.49 | 3 | 15.40 | 0.99 | 2 | 11.40 | 3.21 | 3 | 6.35 | 0.71 | 3 |
| L040 | 1.80 | 1.14 | 3 | 54.37 | 3.81 | 3 | 7.20 | 1.83 | 3 | 13.35 | 1.63 | 2 | 4.50 | 3.22 | 3 | 4.95 | 2.54 | 3 |
| L041 | 0.33 | 0.21 | 3 | 47.27 | 9.92 | 3 | 11.57 | 3.50 | 3 | 33.15 | 2.19 | 2 | 15.67 | 1.39 | 3 | 10.70 | 0.10 | 3 |
| L042 | 0.60 | 0.08 | 3 | 43.97 | 2.45 | 3 | 7.60 | 0.95 | 3 | 19.60 | 8.91 | 2 | 6.83 | 3.21 | 3 | 11.00 | 1.99 | 3 |
| L043 | 1.17 | 0.42 | 3 | 45.07 | 1.69 | 3 | 2.93 | 0.81 | 3 | 31.55 | 8.56 | 2 | 11.37 | 8.06 | 3 | 6.95 | 2.52 | 3 |
| L044 | 1.00 | 0.64 | 3 | 66.35 | 4.26 | 3 | 8.00 | 0.52 | 3 | 25.95 | 9.12 | 2 | 10.37 | 2.06 | 3 | 2.60 | 0.42 | 3 |
| L045 | 0.73 | 0.45 | 3 | 64.20 | 3.24 | 3 | 10.27 | 2.05 | 3 | 34.60 | 6.22 | 2 | 12.30 | 2.90 | 3 | 5.95 | 1.36 | 3 |
| L046 | 1.77 | 1.11 | 3 | 47.70 | 11.53 | 3 | 6.70 | 1.97 | 3 | 20.05 | 2.33 | 2 | 8.60 | 4.10 | 3 | 6.40 | 0.78 | 3 |
| L047 | 2.00 | 0.57 | 3 | 45.37 | 12.50 | 3 | 9.43 | 1.02 | 3 | 40.15 | 4.60 | 2 | 11.33 | 7.96 | 3 | 1.65 | 0.75 | 3 |
| L048 | 0.67 | 0.41 | 3 | 50.53 | 11.07 | 3 | 6.37 | 1.37 | 3 | 42.25 | 3.32 | 2 | 13.30 | 6.26 | 3 | 2.70 | 0.45 | 3 |
| L049 | 1.47 | 0.50 | 3 | 22.23 | 0.48 | 3 | 6.57 | 0.95 | 3 | 18.05 | 1.91 | 2 | 14.97 | 4.96 | 3 | 5.35 | 0.98 | 3 |
| L050 | 1.47 | 1.07 | 3 | 43.87 | 5.89 | 3 | 4.80 | 0.40 | 3 | 22.65 | 10.68 | 2 | 13.23 | 2.67 | 3 | 4.10 | 0.70 | 3 |
| L051 | 1.20 | 0.59 | 3 | 57.13 | 3.24 | 3 | 7.53 | 2.51 | 3 | 30.80 | 8.63 | 2 | 10.97 | 8.58 | 3 | 8.85 | 2.08 | 3 |
| L052 | 2.00 | 1.28 | 3 | 49.30 | 1.31 | 3 | 10.80 | 3.12 | 3 | 43.40 | 0.14 | 2 | 11.27 | 1.78 | 3 | 3.95 | 2.18 | 3 |
| L053 | 2.00 | 1.35 | 3 | 42.30 | 3.48 | 3 | 9.27 | 1.05 | 3 | 37.05 | 6.86 | 2 | 10.13 | 6.62 | 3 | 13.80 | 1.23 | 3 |
| L054 | 1.60 | 0.99 | 3 | 56.00 | 1.80 | 3 | 6.23 | 3.70 | 3 | 32.10 | 7.07 | 2 | 12.03 | 6.46 | 3 | 7.05 | 1.00 | 3 |
| L055 | 0.50 | 0.22 | 3 | 55.37 | 1.92 | 3 | 4.43 | 0.78 | 3 | 14.85 | 5.59 | 2 | 12.77 | 6.56 | 3 | 6.80 | 2.86 | 3 |
| L056 | 2.47 | 1.40 | 3 | 56.43 | 2.27 | 3 | 8.67 | 5.59 | 3 | 29.00 | 5.37 | 2 | 3.30 | 1.73 | 3 | 6.20 | 0.99 | 3 |
| L057 | 3.17 | 0.97 | 3 | 53.63 | 6.42 | 3 | 9.57 | 2.49 | 3 | 27.65 | 6.86 | 2 | 15.07 | 8.36 | 3 | 3.00 | 0.50 | 3 |
| L058 | 1.03 | 0.42 | 3 | 52.20 | 9.24 | 3 | 4.67 | 0.76 | 3 | 23.05 | 5.59 | 2 | 9.90 | 2.18 | 3 | 1.15 | 1.27 | 3 |
| L059 | 1.47 | 0.52 | 3 | 41.27 | 17.48 | 3 | 11.10 | 3.01 | 3 | 44.20 | 4.67 | 2 | 8.80 | 4.41 | 3 | 5.95 | 1.59 | 3 |
| L060 | 2.03 | 1.25 | 3 | 42.53 | 1.09 | 3 | 8.33 | 0.55 | 3 | 26.80 | 6.08 | 2 | 13.00 | 6.80 | 3 | 1.60 | 0.92 | 3 |
| L061 | 1.53 | 0.87 | 3 | 33.53 | 4.62 | 3 | 11.10 | 1.65 | 3 | 34.35 | 9.83 | 2 | 15.10 | 11.23 | 3 | 3.20 | 0.12 | 3 |
| L062 | 2.33 | 0.94 | 3 | 56.47 | 5.91 | 3 | 12.63 | 5.36 | 3 | 42.20 | 8.20 | 2 | 13.10 | 7.41 | 3 | 9.00 | 1.93 | 3 |
| L063 | 2.17 | 1.25 | 3 | 60.77 | 3.09 | 3 | 11.03 | 0.91 | 3 | 32.20 | 8.34 | 2 | 8.77 | 4.32 | 3 | 9.00 | 1.45 | 3 |
| L064 | 1.97 | 1.14 | 3 | 55.70 | 10.99 | 3 | 10.40 | 1.00 | 3 | 26.35 | 3.04 | 2 | 9.50 | 3.74 | 3 | 8.40 | 2.60 | 3 |
| L065 | 2.10 | 1.31 | 3 | 61.57 | 4.12 | 3 | 7.93 | 2.32 | 3 | 41.55 | 1.77 | 2 | 9.27 | 4.77 | 3 | 4.95 | 2.04 | 3 |
| L066 | 1.47 | 0.94 | 3 | 35.83 | 3.98 | 3 | 8.40 | 2.82 | 3 | 26.45 | 7.14 | 2 | 9.67 | 5.69 | 3 | 10.75 | 3.61 | 3 |
| L067 | 1.70 | 1.15 | 3 | 52.07 | 3.77 | 3 | 10.13 | 2.87 | 3 | 30.20 | 1.27 | 2 | 13.90 | 6.69 | 3 | 12.00 | 3.89 | 3 |
| L068 | 1.57 | 0.62 | 3 | 54.97 | 0.16 | 3 | 13.40 | 1.71 | 3 | 45.60 | 0.99 | 2 | 8.43 | 1.76 | 3 | 11.30 | 2.78 | 3 |
| L069 | 1.50 | 0.45 | 3 | 45.43 | 0.45 | 3 | 12.10 | 5.22 | 3 | 34.25 | 0.49 | 2 | 8.00 | 3.39 | 3 | 7.55 | 2.70 | 3 |
| No | 0.30 | 0.22 | 3 | 0.40 | 0.22 | 3 | 0.23 | 0.06 | 3 | 0.05 | 0.07 | 2 | 0.40 | 0.10 | 3 | 0.00 | 0.00 | 3 |
| treatment | | | | | | | | | | | | | | | | | | |
| 1XNLS | 0.07 | 0.09 | 3 | 0.50 | 4.77 | 3 | 0.07 | 0.06 | 0 | 0.00 | 0.00 | 2 | 0.10 | 0.00 | 3 | 0.00 | 0.06 | 3 |
| Cas9 | | | | | | | | | | | | | | | | | | |
| GFP | 0.13 | 0.12 | 3 | | | 3 | 0.30 | 0.20 | 1 | 0.10 | 0.14 | 2 | 0.13 | 0.12 | 3 | 0.10 | 0.10 | 3 |

TABLE 61B
Mean percent of total reads containing at least 1 cytosine to thymidine (% C to T) conversion

| | BC36 | | | BC38 | | | BC39 | | | BC41 | | | BC42 | | |
|---|---|---|---|---|---|---|---|---|---|---|---|---|---|---|---|
| Linker | Mean | SD | N | Mean | SD | N | Mean | SD | N | Mean | SD | N | Mean | SD | N |
| L001 (XTEN | 33.95 | 15.20 | 2 | 22.90 | 0.42 | 2 | 29.47 | 3.11 | 3 | 0.33 | 0.09 | 3 | 55.80 | 4.60 | 3 |
| control) | | | | | | | | | | | | | | | |
| L002 | 26.15 | 6.72 | 2 | 1.70 | 0.42 | 2 | 40.03 | 3.27 | 3 | 22.60 | 1.63 | 3 | 57.15 | 3.55 | 3 |
| L003 | 34.35 | 7.28 | 2 | 2.05 | 0.07 | 2 | 39.30 | 5.48 | 3 | 27.73 | 2.58 | 3 | 39.90 | 8.40 | 3 |
| L004 | 38.85 | 3.18 | 2 | 5.35 | 2.05 | 2 | 36.73 | 3.75 | 3 | 30.97 | 2.17 | 3 | 47.45 | 0.85 | 3 |
| L005 | 28.70 | 6.08 | 2 | 6.45 | 4.60 | 2 | 42.53 | 3.93 | 3 | 17.90 | 3.16 | 3 | 41.15 | 2.85 | 3 |
| L006 | 33.50 | 5.94 | 2 | 20.20 | 1.13 | 2 | 43.60 | 2.02 | 3 | 17.17 | 0.88 | 3 | 39.80 | 2.20 | 3 |
| L007 | 38.35 | 1.63 | 2 | 5.75 | 2.62 | 2 | 23.37 | 2.80 | 3 | 20.03 | 2.01 | 3 | 32.55 | 8.15 | 3 |
| L008 | 19.30 | 1.84 | 2 | 12.30 | 2.26 | 2 | 37.15 | 4.88 | 3 | 17.70 | 0.71 | 3 | 30.95 | 14.55 | 3 |
| L009 | 26.70 | 5.23 | 2 | 6.70 | 0.85 | 2 | 25.40 | 0.96 | 3 | 15.27 | 4.74 | 3 | 40.85 | 3.95 | 3 |
| L010 | 24.70 | 2.12 | 2 | 12.10 | 6.08 | 2 | 29.85 | 1.06 | 3 | 12.20 | 2.13 | 3 | 39.05 | 10.55 | 3 |
| L011 | 22.40 | 1.13 | 2 | 8.00 | 0.00 | 2 | 33.67 | 5.40 | 3 | 13.07 | 4.90 | 3 | 52.95 | 0.95 | 3 |
| L012 | 31.75 | 5.59 | 2 | 14.00 | 15.41 | 2 | 39.67 | 2.90 | 3 | 14.00 | 4.01 | 3 | 28.40 | 4.90 | 3 |
| L013 | 53.15 | 4.60 | 2 | 10.20 | 1.41 | 2 | 38.80 | 5.02 | 3 | 12.40 | 2.57 | 3 | 43.25 | 3.55 | 3 |
| L014 | 48.25 | 4.31 | 2 | 13.80 | 3.39 | 2 | 41.50 | 5.51 | 3 | 10.60 | 4.83 | 3 | 42.65 | 3.85 | 3 |
| L015 | 46.45 | 5.87 | 2 | 15.05 | 1.77 | 2 | 41.23 | 2.85 | 3 | 11.97 | 3.06 | 3 | 37.25 | 6.45 | 3 |
| L016 | 48.15 | 3.61 | 2 | 4.60 | 0.85 | 2 | 45.47 | 2.84 | 3 | 9.57 | 2.47 | 3 | 38.70 | 2.90 | 3 |
| L017 | 49.50 | 10.47 | 2 | 9.00 | 0.42 | 2 | 40.40 | 2.10 | 3 | 20.07 | 1.80 | 3 | 47.10 | 3.90 | 3 |
| L018 | 50.75 | 9.12 | 2 | 6.45 | 2.62 | 2 | 42.60 | 5.54 | 3 | 17.50 | 3.15 | 3 | 41.80 | 12.30 | 3 |
| L019 | 44.05 | 0.07 | 2 | 26.45 | 4.17 | 2 | 43.20 | 5.78 | 3 | 8.13 | 1.72 | 3 | 47.35 | 0.75 | 3 |
| L020 | 39.40 | 5.09 | 2 | 14.40 | 6.08 | 2 | 41.90 | 3.65 | 3 | 9.63 | 3.84 | 3 | 39.95 | 3.55 | 3 |
| L021 | 51.10 | 2.83 | 2 | 16.80 | 2.69 | 2 | 38.83 | 1.74 | 3 | 10.30 | 3.89 | 3 | 26.40 | 6.20 | 3 |
| L022 | 35.20 | 2.12 | 2 | 3.30 | 1.27 | 2 | 29.05 | 1.63 | 3 | 16.77 | 2.65 | 3 | 34.10 | 3.10 | 3 |
| L023 | 48.70 | 10.18 | 2 | 5.40 | 3.82 | 2 | 35.23 | 4.81 | 3 | 8.23 | 3.21 | 3 | 56.10 | 1.50 | 3 |
| L024 | 45.80 | 0.42 | 2 | 15.45 | 5.59 | 2 | 33.87 | 2.02 | 3 | 14.87 | 3.20 | 3 | 22.10 | 7.20 | 3 |
| L025 | 57.40 | 7.21 | 2 | 18.35 | 4.03 | 2 | 38.27 | 3.41 | 3 | 24.83 | 2.50 | 3 | 45.90 | 1.10 | 3 |
| L026 | 51.50 | 11.74 | 2 | 10.70 | 0.42 | 2 | 43.47 | 3.01 | 3 | 13.80 | 5.37 | 3 | 35.30 | 0.60 | 3 |
| L027 | 51.00 | 2.69 | 2 | 18.00 | 4.95 | 2 | 41.73 | 3.43 | 3 | 10.90 | 3.24 | 3 | 49.90 | 0.10 | 3 |
| L028 | 50.25 | 2.90 | 2 | 20.40 | 2.69 | 2 | 41.53 | 3.00 | 3 | 15.67 | 5.03 | 3 | 40.90 | 6.70 | 3 |
| L029 | 33.80 | 1.56 | 2 | 16.85 | 1.06 | 2 | 37.70 | 3.80 | 3 | 23.47 | 2.16 | 3 | 25.75 | 9.15 | 3 |
| L030 | 25.80 | 3.68 | 2 | 19.10 | 3.54 | 2 | 43.77 | 3.59 | 3 | 15.10 | 7.97 | 3 | 46.80 | 3.60 | 3 |
| L031 | 53.35 | 5.02 | 2 | 7.60 | 2.12 | 2 | 40.80 | 4.72 | 3 | 9.73 | 5.61 | 3 | 47.75 | 1.65 | 3 |
| L032 | 61.65 | 8.98 | 2 | 11.35 | 3.04 | 2 | 23.70 | 4.80 | 3 | 29.97 | 3.97 | 3 | 30.70 | 4.60 | 3 |
| L033 | 19.90 | 3.68 | 2 | 11.75 | 0.49 | 2 | 32.37 | 1.42 | 3 | 12.37 | 3.82 | 3 | 49.95 | 1.65 | 3 |
| L034 | 48.00 | 0.85 | 2 | 7.55 | 3.32 | 2 | 19.60 | 0.99 | 3 | 14.63 | 2.67 | 3 | 32.05 | 1.25 | 3 |
| L035 | 40.85 | 0.64 | 2 | 5.75 | 1.48 | 2 | 27.43 | 4.48 | 3 | 9.87 | 4.11 | 3 | 42.10 | 1.30 | 3 |
| L036 | 30.50 | 5.23 | 2 | 9.80 | 4.10 | 2 | 27.27 | 3.21 | 3 | 16.03 | 2.52 | 3 | 41.60 | 1.30 | 3 |
| L037 | 41.80 | 11.17 | 2 | 27.50 | 3.39 | 2 | 26.73 | 3.25 | 3 | 12.90 | 7.05 | 3 | 39.75 | 2.65 | 3 |
| L038 | 41.20 | 1.98 | 2 | 4.55 | 0.78 | 2 | 42.27 | 0.76 | 3 | 10.07 | 2.83 | 3 | 41.85 | 0.95 | 3 |
| L039 | 39.20 | 0.99 | 2 | 12.85 | 7.85 | 2 | 32.83 | 3.56 | 3 | 16.00 | 7.47 | 3 | 29.30 | 3.70 | 3 |
| L040 | 58.90 | 3.54 | 2 | 7.20 | 2.55 | 2 | 41.53 | 5.04 | 3 | 15.37 | 4.58 | 3 | 30.25 | 3.85 | 3 |
| L041 | 25.00 | 1.84 | 2 | 10.30 | 4.10 | 2 | 31.27 | 4.11 | 3 | 15.80 | 6.83 | 3 | 46.85 | 1.65 | 3 |
| L042 | 59.35 | 9.26 | 2 | 14.80 | 0.28 | 2 | 27.70 | 2.63 | 3 | 17.97 | 4.63 | 3 | 37.35 | 8.25 | 3 |
| L043 | 34.45 | 6.58 | 2 | 0.20 | 0.28 | 2 | 25.53 | 5.01 | 3 | 8.53 | 2.82 | 3 | 39.95 | 6.45 | 3 |
| L044 | 50.70 | 4.10 | 2 | 13.20 | 1.27 | 2 | 34.77 | 3.35 | 3 | 16.63 | 4.64 | 3 | 24.85 | 4.15 | 3 |
| L045 | 36.40 | 6.36 | 2 | 7.45 | 3.75 | 2 | 36.67 | 2.66 | 3 | 18.67 | 2.53 | 3 | 43.45 | 1.65 | 3 |
| L046 | 49.05 | 5.16 | 2 | 9.35 | 0.64 | 2 | 26.90 | 0.28 | 3 | 14.33 | 1.87 | 3 | 40.00 | 0.10 | 3 |
| L047 | 49.05 | 8.84 | 2 | 10.50 | 1.13 | 2 | 33.10 | 5.60 | 3 | 15.03 | 2.81 | 3 | 48.10 | 8.50 | 3 |
| L048 | 56.50 | 0.14 | 2 | 7.45 | 3.46 | 2 | 40.77 | 2.81 | 3 | 17.60 | 2.84 | 3 | 46.95 | 5.45 | 3 |
| L049 | 29.50 | 3.82 | 2 | 13.35 | 0.78 | 2 | 38.67 | 2.25 | 3 | 11.30 | 4.30 | 3 | 19.50 | 5.00 | 3 |
| L050 | 36.70 | 0.28 | 2 | 13.30 | 2.26 | 2 | 29.10 | 2.08 | 3 | 9.80 | 6.38 | 3 | 39.85 | 5.15 | 3 |
| L051 | 31.30 | 0.99 | 2 | 24.45 | 7.14 | 2 | 34.07 | 3.72 | 3 | 11.33 | 3.11 | 3 | 30.50 | 3.20 | 3 |
| L052 | 50.55 | 5.30 | 2 | 19.45 | 0.21 | 2 | 33.63 | 3.65 | 3 | 13.07 | 5.70 | 3 | 48.20 | 2.60 | 3 |
| L053 | 44.35 | 4.60 | 2 | 6.55 | 3.75 | 2 | 35.83 | 2.54 | 3 | 12.83 | 4.09 | 3 | 49.65 | 2.25 | 3 |
| L054 | 33.65 | 4.31 | 2 | 25.50 | 2.69 | 2 | 39.97 | 7.47 | 3 | 21.33 | 8.77 | 3 | 53.95 | 2.15 | 3 |
| L055 | 47.80 | 2.40 | 2 | 7.95 | 0.78 | 2 | 28.17 | 2.50 | 3 | 12.17 | 7.25 | 3 | 49.60 | 2.50 | 3 |
| L056 | 31.10 | 3.39 | 2 | 9.55 | 0.92 | 2 | 45.03 | 6.52 | 3 | 12.37 | 3.70 | 3 | 51.35 | 2.25 | 3 |
| L057 | 52.45 | 7.85 | 2 | 12.90 | 9.90 | 2 | 26.93 | 1.20 | 3 | 14.63 | 5.10 | 3 | 47.65 | 4.55 | 3 |
| L058 | 44.95 | 3.61 | 2 | 7.90 | 0.42 | 2 | 26.85 | 2.05 | 3 | 11.17 | 0.57 | 3 | 38.80 | 3.50 | 3 |
| L059 | 54.65 | 7.57 | 2 | 8.45 | 4.31 | 2 | 33.60 | 4.75 | 3 | 11.03 | 4.98 | 3 | 44.90 | 7.60 | 3 |
| L060 | 60.95 | 1.34 | 2 | 16.25 | 2.62 | 2 | 31.47 | 1.54 | 3 | 11.63 | 5.54 | 3 | 1.35 | 0.75 | 3 |
| L061 | 38.25 | 3.75 | 2 | 8.25 | 2.33 | 2 | 42.17 | 1.14 | 3 | 18.40 | 5.80 | 3 | 30.95 | 5.15 | 3 |
| L062 | 30.95 | 3.18 | 2 | 10.40 | 5.52 | 2 | 33.70 | 6.12 | 3 | 22.27 | 7.07 | 3 | 31.60 | 10.50 | 3 |
| L063 | 41.15 | 1.20 | 2 | 24.15 | 4.45 | 2 | 38.67 | 4.02 | 3 | 14.50 | 3.11 | 3 | 32.35 | 3.05 | 3 |
| L064 | 60.90 | 3.11 | 2 | 22.20 | 2.83 | 2 | 40.80 | 2.30 | 3 | 17.30 | 3.49 | 3 | 43.90 | 0.90 | 3 |
| L065 | 55.45 | 6.01 | 2 | 18.75 | 2.19 | 2 | 34.97 | 4.17 | 3 | 21.40 | 1.28 | 3 | 36.45 | 11.15 | 3 |
| L066 | 34.10 | 3.82 | 2 | 25.05 | 3.32 | 2 | 24.77 | 1.02 | 3 | 18.30 | 2.55 | 3 | 40.95 | 5.95 | 3 |
| L067 | 28.15 | 0.78 | 2 | 8.60 | 6.65 | 2 | 38.77 | 0.93 | 3 | 22.00 | 9.53 | 3 | 37.25 | 5.45 | 3 |
| L068 | 16.55 | 1.77 | 2 | 26.75 | 2.62 | 2 | 35.30 | 1.87 | 3 | 5.00 | 1.80 | 3 | 42.00 | 8.00 | 3 |
| L069 | 51.70 | 3.25 | 2 | 20.40 | 2.40 | 2 | 40.30 | 2.82 | 3 | 9.93 | 3.16 | 3 | 36.30 | 10.40 | 3 |
| No treatment | 0.15 | 0.07 | 2 | 0.15 | 0.07 | 2 | 1.27 | 1.36 | 3 | 0.17 | 0.09 | 3 | 0.20 | 0.00 | 3 |
| 1XNLS Cas9 | 0.15 | 0.21 | 2 | 0.00 | 0.00 | 2 | 0.00 | 0.00 | 3 | 0.03 | 0.05 | 3 | 0.10 | 0.10 | 3 |
| GFP | 0.40 | 0.28 | 2 | 0.00 | 0.00 | 2 | 0.33 | 0.12 | 3 | 0.23 | 0.05 | 3 | 0.25 | 0.05 | 3 |

### Example 26. Base Editing by Constructs with Various Linkers in Huh-7 Cells

[0686] Select base editor constructs derived from BC22 but with linkers from Table 60 substituted between the cytosine deaminase and Cas9 nickase were assayed for C to T base editing activity using Lipofectamine transfection of mRNA and gRNA. Tested base editor mRNAs include SEQ ID NOs: 19 and 347-357. Constructs were screened in a dilution series ranging from 150 ng to 1.17 ng of base editor mRNA in Huh-7 cells, co-delivered with a dilution series of SERPINA1 sgRNA (G000255) ranging from 20 to 0.15 nM and UGI mRNA (SEQ ID No: 25) at a dose of 25 to 0.20 ng in 100 uL of media. C to T base editing of each construct was compared to BC22 (SEQ ID No: 19).

### Example 26.1. Cell Preparation and Transfection

[0687] Huh-7 cells growing in Dulbecco's Modified Eagle's Medium (DMEM) supplemented with 10% Fetal Bovine Serum (FBS) in 96-well plates were transfected using Lipofectamine® RNAiMAX with an 8-point, two-fold dilution series starting with a maximum dose of 150 ng base editor mRNA, 25 ng UGI mRNA and 20 nM sgRNA in 100 uL media.

### Example 26.2. Evaluation of C to T Editing Purity by NGS

[0688] Seventy-two hours post transfection, Huh-7 cells were subjected to lysis, PCR amplification of the SERPINA1 locus and subsequent NGS analysis, as described in Example 1. Table 62 and FIG. 41 show SERPINA1 editing levels and the C to T editing purity in samples treated with either 2.3 or 75 ng of different base editor mRNAs and corresponding levels of diluted UGI mRNA and G000255 (SERPINA1). Mean percent C to T conversion for base editor mRNAs with different linkers are shown in Tables 63A-63B. Table 64 and FIG. 42 show EC90 (mass of base editor mRNA required to edit 90% of maximum C to T edits) ranges from 9.7 to 23.1 ng. All the tested base editor mRNAs similar levels of maximal editing at high doses

TABLE 62
Mean percent editing at SERPINA1 in Huh-7 Indels = insertions
or deletions.

| Base editor | | C to T (%) | | C to A/G (%) | | Indels (%) | |
|---|---|---|---|---|---|---|---|
| mRNA (ng) | Linker | Mean | SD | Mean | SD | Mean | SD |
| 2.3 | L001 | 49.6 | 3.0 | 3.0 | 0.4 | 10.7 | 0.6 |
| | (XTEN control) | | | | | | |
| | L015 | 43.7 | 0.8 | 2.7 | 0.1 | 9.0 | 1.6 |
| | L016 | 43.4 | 2.8 | 3.0 | 0.4 | 10.7 | 0.5 |
| | L019 | 50.2 | 5.7 | 3.3 | 0.4 | 11.3 | 0.6 |
| | L021 | 45.3 | 7.5 | 3.1 | 0.6 | 10.5 | 0.1 |
| | L024 | 46.3 | 2.2 | 3.3 | 0.0 | 10.7 | 0.1 |
| | L025 | 33.2 | 14.3 | 2.4 | 0.7 | 9.9 | 0.9 |
| | L036 | 46.5 | 1.4 | 3.0 | 0.6 | 8.0 | 1.2 |
| | L051 | 38.4 | 6.2 | 2.5 | 0.1 | 7.2 | 0.4 |
| | L062 | 40.8 | 7.7 | 1.2 | 1.7 | 10.0 | 2.6 |
| | L063 | 37.8 | 1.8 | 2.0 | 0.5 | 6.9 | 0.3 |
| | L066 | 33.4 | 9.2 | 2.7 | 0.4 | 7.2 | 1.6 |
| 75 | L001 | 89.8 | 0.8 | 2.3 | 0.4 | 4.4 | 0.2 |
| | (XTEN control) | | | | | | |
| | L015 | 83.6 | 0.8 | 2.9 | 0.8 | 5.3 | 0.1 |
| | L016 | 87.9 | 1.1 | 2.9 | 0.0 | 5.2 | 0.3 |
| | L019 | 89.6 | 0.8 | 2.7 | 0.2 | 4.3 | 0.5 |
| | L021 | 91.1 | 0.3 | 2.0 | 0.3 | 3.3 | 0.3 |
| | L024 | 89.9 | 2.1 | 3.0 | 0.5 | 3.8 | 0.9 |
| | L025 | 89.8 | 0.8 | 3.4 | 0.1 | 3.5 | 0.3 |
| | L036 | 90.4 | 1.0 | 2.8 | 0.0 | 3.4 | 0.1 |
| | L051 | 91.3 | 0.9 | 2.0 | 0.1 | 3.3 | 0.4 |
| | L062 | 91.1 | 0.4 | 2.6 | 0.2 | 2.7 | 0.2 |
| | L063 | 87.2 | 3.5 | 2.6 | 0.2 | 3.6 | 0.4 |
| | L066 | 91.9 | 0.4 | 2.4 | 0.1 | 3.1 | 0.1 |

TABLE 63A
Mean percent C to T editing at SERPINA1 in Huh-7 cells.

| | L001 | | | | | | | | | | | |
|---|---|---|---|---|---|---|---|---|---|---|---|---|
| Base editor | (XTEN control) | | L015 | | L016 | | L019 | | L021 | | L024 | |
| mRNA (ng) | Mean | SD | Mean | SD | Mean | SD | Mean | SD | Mean | SD | Mean | SD |
| 150.00 | 83.4 | 0.9 | 81.3 | 0.4 | 79.9 | 0.3 | 80.4 | 1.0 | 81.6 | 3.4 | 84.4 | — |
| 75.00 | 89.8 | 0.8 | 83.6 | 0.8 | 87.9 | 1.1 | 89.6 | 0.8 | 91.1 | 0.3 | 89.9 | 2.1 |
| 37.50 | 87.9 | 1.0 | 84.2 | 6.2 | 88.6 | 0.7 | 88.1 | 0.6 | 87.9 | 0.5 | 88.7 | 1.3 |
| 18.75 | 85.6 | 1.5 | 74.7 | 4.7 | 83.8 | 1.0 | 85.4 | 2.3 | 83.6 | 1.9 | 84.9 | 1.6 |
| 9.38 | 73.2 | 0.1 | 68.7 | 0.1 | 74.5 | 3.6 | 72.2 | 4.5 | 71.6 | 5.3 | 76.5 | 1.8 |
| 4.69 | 66.1 | 0.3 | 54.7 | 4.0 | 61.0 | 3.7 | 66.9 | 1.9 | 62.3 | 1.2 | 58.2 | 2.0 |
| 2.34 | 49.6 | 3.0 | 43.7 | 0.8 | 43.4 | 2.8 | 50.2 | 5.7 | 45.3 | 7.5 | 46.3 | 2.2 |
| 1.17 | 29.0 | 0.2 | 25.8 | 0.8 | 25.0 | 0.9 | 28.3 | 3.7 | 24.9 | 3.0 | 25.1 | 2.6 |

TABLE 63B
Mean percent C to T editing at SERPINA1 in Huh-7 cells.

| | L025 | | L036 | | L051 | | L062 | | L063 | | L066 | |
|---|---|---|---|---|---|---|---|---|---|---|---|---|
| Base editor mRNA (ng) | Mean | SD | Mean | SD | Mean | SD | Mean | SD | Mean | SD | Mean | SD |
| 150.00 | 81.5 | 3.4 | 82.2 | 3.7 | 84.0 | 0.5 | 84.3 | 1.6 | 78.7 | 2.4 | 78.8 | 3.5 |
| 75.00 | 89.8 | 0.8 | 90.4 | 1.0 | 91.3 | 0.9 | 91.1 | 0.4 | 87.2 | 3.5 | 91.9 | 0.4 |
| 37.50 | 85.4 | 4.0 | 90.0 | 2.2 | 89.6 | 2.6 | 89.1 | 1.8 | 81.7 | 1.6 | 89.5 | 0.7 |
| 18.75 | 83.1 | 1.0 | 87.0 | 1.3 | 84.1 | 2.9 | 86.2 | 1.0 | 74.9 | 1.8 | 84.8 | 0.6 |
| 9.38 | 71.7 | 0.3 | 78.9 | 0.5 | 76.8 | 0.7 | 73.9 | 7.4 | 67.2 | 2.5 | 67.9 | 1.0 |
| 4.69 | 59.3 | 2.1 | 68.3 | 2.2 | 58.7 | 5.1 | 62.7 | 4.1 | 48.6 | 2.0 | 55.7 | 8.5 |
| 2.34 | 33.2 | 14.3 | 46.5 | 1.4 | 38.4 | 6.2 | 40.8 | 7.7 | 37.8 | 1.8 | 33.4 | 9.2 |
| 1.17 | 23.1 | 0.7 | 30.8 | 1.4 | 25.1 | 1.1 | 26.8 | 1.2 | 23.5 | 3.6 | 28.1 | 2.8 |

TABLE 64
Mass of BC22 mRNAs that leads to 90% of the
maximum C to T editing at SERPINA1. The 95%
confidence interval for each EC90 value is also shown.

| | EC90 | 95% confidence interval | |
|---|---|---|---|
| Linker | (ng) | Max (ng) | Min (ng) |
| L001 (XTEN control) | 11.23 | 16.33 | 8.199 |
| L015 | 18.84 | 32.71 | 12.28 |
| L016 | 11.57 | 16.91 | 8.421 |
| L019 | 9.974 | 17.4 | 6.444 |
| L021 | 13.07 | 22.77 | 8.449 |
| L024 | 14.67 | 21.5 | 10.700 |
| L025 | 13.99 | 25.53 | 8.893 |
| L036 | 9.744 | 13.98 | 7.213 |
| L051 | 14.25 | 21.44 | 10.21 |
| L062 | 13.84 | 22.82 | 9.324 |
| L063 | 23.14 | 41.8 | 14.77 |
| L066 | 19.38 | 48.34 | 10.54 |

### Example 27. Base Editing by Constructs with Various Linkers in Primary Human Hepatocytes (PHH)

[0689] Select base editor constructs derived from BC22n but with linkers from Table 65 substituted between the cytosine deaminase and Cas9 nickase were assayed for C to T base editing activity in PHH. Constructs (SEQ ID NOs: 341-346) were screened in a 12-point dilution series of base editor mRNA in PHH cells, co-delivered with a fixed mass of ANAPC5 sgRNA (G019427) and UGI mRNA (SEQ ID NO: 34). The C to T editing efficiency of each tested based editor construct was compared to BC22n (SEQ ID NO: 1).

TABLE 65
Additional linker peptides.

| Linker ID | Linker amino acid sequence |
|---|---|
| L001 | SGSETPGTSESATPES (SEQ ID NO: 46) |
| (XTEN | |
| control) | |
| L070 | GTKDSTKDIPETPSKD (SEQ ID NO: 268) |
| L071 | GRDVRQPEVKEEKPES (SEQ ID NO: 269) |
| L072 | EGKSSGSGSESKSTAG (SEQ ID NO: 270) |
| L073 | TPGSPAGSPTSTEEGT (SEQ ID NO: 271) |
| L074 | GSEPATSGSETPGTST (SEQ ID NO: 272) |
| L019 | EAAAKEAAAKEAAAK (SEQ ID NO: 51) |

### Example 27.1. Cell Preparation and Transfection

[0690] PHH cells are thawed and recovered in CHRMs media (Gibco, cat #CM7000). They are then resuspended in Primary Hepatocyte Plating Media (Consisting of William's E media (Gibco, Cat #A1217601) and primary hepatocyte plating supplements (Gibco, Cat #CM3000))) to be plated in collagen-coated 96-well plates at a density of 33,000 cells/well for twenty-four hours. Post twenty-four hours, cells are washed, and fresh primary hepatocyte maintenance media is added on cells. Cells are then transfected simultaneously with separate lipoplexes formed individually with either UGI mRNA (SEQ ID No: 34), ANAPC5 sgRNA G019427 or base editor mRNA.

[0691] Lipofection reagent was prepared as mixture of lipids at a ratio of 50/9/38/3 Lipid A, DSPC, cholesterol and PEG2k-DMG as described in Example 1. Lipofection reagent was combined by bulk mixing with separately with each RNA species: base editor mRNA, UGI mRNA or gRNA G019427. The materials were combined at a lipid amine to RNA phosphate (N:P) molar ratio of about 6. The resulting bulk-mixed lipoplex material (lipid kits) was pre-incubated with 10% FBS (Gibco; A3160501) in Primary Hepatocyte Maintenance Media (Consisting of William's E media (Gibco, Cat #A1217601) and primary hepatocyte maintenance supplements (Gibco, Cat #CM4000)), for 15 min before addition to hepatocytes.

[0692] Each well received three components in a final volume of 100 uL: base editor mRNAs ranging from 400 ng to 0 ng of mRNAs, 30 ng of UGI mRNA and 5 pmols of G019427 (ANAPC5).

### Example 27.2 Evaluation of C to T Editing Purity by Next Generation Sequencing (NGS)

[0693] Seventy-two hours post transfection, PHH cells were subjected to lysis, PCR amplification of the ANAPC5 locus and subsequent NGS analysis, as described in Example 1. Table 66 and FIG. 43 show ANAPC5 total editing levels and the C to T editing purity in samples treated with either 400 or 6.25 ng of different base editor mRNAs in addition to 30 ng of UGI mRNA (SEQ ID No: 34) and 5 pmols of G019427 (ANAPC5).

[0694] C to T base editing for a range of base editor mRNAs doses is shown in Table 67. The EC95 (mass of BC22n mRNA required to edit 95% of maximum C to T edits) was calculated as shown in Table 68 and FIG. 44. All of the base editor mRNAs were able to achieve the similar levels of maximal editing at high doses.

TABLE 66
Mean percent editing at ANAPC5 in PHH cells using base
editing constructs designed with various
peptide linkers. Indels = insertions or deletions.

| Base editor | | | | | | | |
|---|---|---|---|---|---|---|---|
| mRNA | | C TO T (%) | | C to A/G (%) | | Indels (%) | |
| (ng) | Linker | Mean | SD | Mean | SD | Mean | SD |
| 6.25 | L001 | 74.9 | 1.6 | 0.6 | 0.1 | 0.6 | 0.2 |
| | (XTEN control) | | | | | | |
| | L070 | 58.0 | 3.4 | 0.5 | 0.0 | 0.5 | 0.1 |
| | L071 | 57.8 | 2.0 | 0.6 | 0.1 | 0.9 | 0.2 |
| | L072 | 63.7 | 2.8 | 0.4 | 0.1 | 0.7 | 0.6 |
| | L073 | 59.7 | 1.3 | 0.5 | 0.1 | 0.6 | 0.1 |
| | L074 | 53.1 | 2.5 | 0.5 | 0.3 | 0.7 | 0.6 |
| | L019 | 59.9 | 3.5 | 0.4 | 0.1 | 0.8 | 0.2 |
| 400 | L001 | 86.3 | 0.1 | 0.6 | 0.4 | 1.2 | 0.4 |
| | (XTEN control) | | | | | | |
| | L070 | 84.3 | 3.3 | 0.6 | 0.2 | 0.7 | 0.1 |
| | L071 | 87.7 | 2.4 | 0.7 | 0.2 | 0.5 | 0.4 |
| | L072 | 86.0 | 0.1 | 0.9 | 0.4 | 0.7 | 0.4 |
| | L073 | 87.9 | 1.8 | 0.9 | 0.0 | 0.8 | 0.3 |
| | L074 | 86.6 | 1.8 | 0.6 | 0.1 | 0.7 | 0.0 |
| | L019 | 86.7 | 4.9 | 0.9 | 0.0 | 1.2 | 0.1 |

TABLE 67
Mean percent C to T editing at the ANAPC5 locus in PHH for base editing constructs designed with various peptide linkers.

| | L001 | | L070 | | L071 | | L072 | | L073 | | L074 | | L019 | |
|---|---|---|---|---|---|---|---|---|---|---|---|---|---|---|
| mRNA (ng) | Mean | SD | Mean | SD | Mean | SD | Mean | SD | Mean | SD | Mean | SD | Mean | SD |
| 400.00 | 86.3 | 0.1 | 84.3 | 3.3 | 87.7 | 2.4 | 86.0 | 0.1 | 87.9 | 1.8 | 86.6 | 1.8 | 86.7 | 4.9 |
| 200.00 | 87.8 | 2.4 | 83.9 | 1.1 | 88.1 | 0.5 | 86.9 | 5.4 | 87.6 | 1.8 | 86.6 | 2.5 | 87.4 | 3.2 |
| 100.00 | 91.1 | 0.2 | 84.7 | 2.3 | 84.6 | 4.5 | 87.0 | 2.5 | 83.6 | 0.1 | 85.1 | 4.7 | 85.9 | 2.5 |
| 50.00 | 89.0 | 1.8 | 78.0 | 5.4 | 82.4 | 5.0 | 85.8 | 0.6 | 83.9 | 1.8 | 84.3 | 0.8 | 85.0 | 3.7 |
| 25.00 | 86.9 | 1.8 | 79.1 | 0.2 | 78.6 | 4.6 | 81.3 | 3.3 | 79.4 | 2.3 | 79.4 | 0.5 | 82.7 | 1.1 |
| 12.50 | 83.2 | 0.8 | 71.3 | 2.5 | 69.3 | 6.0 | 71.8 | 1.6 | 72.6 | 4.4 | 69.2 | 0.9 | 72.8 | 2.5 |
| 6.25 | 74.9 | 1.6 | 58.0 | 3.4 | 57.8 | 2.0 | 63.7 | 2.8 | 59.7 | 1.3 | 53.1 | 2.5 | 59.9 | 3.5 |
| 3.13 | 64.3 | 2.9 | 40.5 | 3.0 | 42.8 | 2.9 | 47.8 | 1.4 | 42.4 | 0.6 | 37.7 | 2.1 | 45.6 | 1.6 |
| 1.56 | 50.8 | 2.7 | 24.6 | 6.6 | 30.8 | 0.2 | 28.3 | 0.7 | 27.8 | 0.7 | 27.1 | 0.7 | 31.6 | 1.1 |
| 0.78 | 35.7 | 2.3 | 18.8 | 0.0 | 20.1 | 0.0 | 20.8 | 0.7 | 17.4 | 0.8 | 16.0 | 0.8 | 22.8 | 3.7 |
| 0.39 | 23.6 | 3.9 | 12.1 | 1.7 | 12.1 | 0.7 | 13.2 | 0.6 | 12.5 | 1.1 | 10.0 | 0.6 | 14.6 | 0.8 |
| 0.00 | 0.4 | 0.2 | 0.6 | 0.1 | 0.5 | 0.0 | 0.6 | 0.2 | 0.4 | 0.1 | 0.4 | 0.3 | 0.6 | 0.1 |

TABLE 68
Mass of base editor mRNAs that leads to 95% of the maximum C to T
editing. The 95% confidence interval for each EC95 value is also shown.

| | | 95% confidence interval | |
|---|---|---|---|
| Linker | EC95 (ng) | Max (ng) | Min (ng) |
| L001 (XTEN control) | 22.73 | 31.91 | 16.75 |
| L070 | 48.99 | 84.83 | 30.52 |
| L071 | 83.46 | 134.60 | 54.97 |
| L072 | 45.72 | 67.33 | 32.28 |
| L073 | 53.62 | 73.54 | 40.17 |
| L074 | 69.89 | 98.83 | 51.13 |
| L019 | 62.06 | 98.67 | 41.39 |

### Example 28. Base Editing by Constructs with Various Linkers in T Cells

[0695] Select base editor constructs derived from BC22n but with linkers from Table 65 substituted between the cytosine deaminase and Cas9 nickase were assayed for C to T base editing activity. Constructs (SEQ ID Nos: 341-346) were screened in a 12-point dilution series of base editor mRNA in healthy human T cells, co-delivered with a fixed amount of TRAC sgRNA (G016017) and of UGI mRNA (SEQ ID NO: 34). The C to T editing efficiency of each base editor mRNA construct was compared to BC22n (SEQ ID NO: 1).

### Example 28.1. T Cell Preparation

[0696] Healthy human donor apheresis was obtained commercially (Hemacare), and cells were washed, re-suspended in CliniMACS® PBS/EDTA buffer (Miltenyi Biotec Cat. 130-070-525) and processed in a MultiMACS™ Cell 24 Separator Plus device (Miltenyi Biotec). T cells were isolated via positive selection using a Straight from Leukopak® CD4/CD8 MicroBead kit, human (Miltenyi Biotec Cat. 130-122-352). T cells were aliquoted and cryopreserved for future use in Cryostor® CS10 (StemCell Technologies Cat. 07930).

[0697] Upon thaw, T cells were plated at a density of 1.0×10\hat{ }6 cells/mL in T cell growth media (TCGM) composed of CTS OpTmizer T Cell Expansion SFM and T Cell Expansion Supplement (ThermoFisher Cat. A1048501), 5% human AB serum (GeminiBio, Cat. 100-512) 1× Penicillin-Streptomycin, 1× Glutamax, 10 mM HEPES, 200 U/mL recombinant human interleukin-2 (Peprotech, Cat. 200-02), 5 ng/ml recombinant human interleukin 7 (Peprotech, Cat. 200-07), and 5 ng/ml recombinant human interleukin 15 (Peprotech, Cat. 200-15). T cells were rested in this media for 24 hours, at which time they were activated with T Cell TransAct™, human reagent (Miltenyi, Cat. 130-111-160) added at a 1:100 ratio by volume. T cells were activated for 48 hours prior to use in screening experiments.

### Example 28.2. T Cell Electroporation and Expansion

[0698] A sgRNA targeting TRAC (G016017) was denatured for 2 minutes at 95° C., incubated at room temperature for 5 minutes and stored on ice. 48 hours post-activation, T cells were harvested, centrifuged at 500 g for 5 min, and resuspended at a concentration of 12.5×10\hat{ }6 T cells/mL in P3 electroporation buffer (Lonza). For each well to be electroporated, 1×10\hat{ }5 T cells were mixed with a decreasing amount of base editor mRNAs ranging from 400 ng to 0 ng, 200 ng of UGI mRNA and 40 pmols of G016017 in a final volume of 20 uL of P3 electroporation buffer.

[0699] The resulting mix was transferred in duplicate to 96-well Nucleofector™ plates (Lonza) and electroporated using the manufacturer's pulse code. Immediately after electroporation, T cells received 80 μL of TCGM and plates were incubated at 37° C. for 15 minutes. After incubation, 80 μL were transferred to new flat-bottom 96-well plates containing 80 μL of TCGM. T cells were incubated at 37° C. for 4 days, at which time they were mixed, split 1:4 with fresh TCGM, and incubated at for 3 additional days prior to phenotypic assessments by flow cytometry.

### Example 28.3. Evaluation of C to T Editing Purity by Next Generation Sequencing (NGS)

[0700] Four days post electroporation, T cells were subjected to lysis, PCR amplification of the TRAC locus and subsequent NGS analysis, as described in Example 1. Table 69 and FIG. 45 show TRAC editing levels and the C to T editing purity in samples treated with either 400 or 6.25 ng of different base editor mRNAs in addition to 200 ng of UGI mRNA (SEQ ID No: 34) and 40 pmols of G016017 (TRAC).

[0701] None of the linkers tested between the N-terminal cytosine deaminase and C-terminal Cas9 nickase limit the efficiency of cytosine base editing or impacts the levels of C to T editing purity.

TABLE 69
Mean percent editing at the TRAC locus in T cells treated with
base editor constructs designed with various linker peptides.

| base editor | | C to T (%) | | C to A/G (%) | | Indels (%) | |
|---|---|---|---|---|---|---|---|
| mRNA (ng) | Linker | Mean | SD | Mean | SD | Mean | SD |
| 6.25 | L001 | 78.9 | 4.9 | 0.3 | 0.1 | 0.3 | 0.3 |
| | (XTEN control) | | | | | | |
| | L070 | 68.2 | 1.8 | 0.3 | 0.2 | 0.2 | 0.1 |
| | L071 | 62.3 | 8.5 | 0.2 | 0.1 | 0.4 | 0.0 |
| | L072 | 62.0 | 4.7 | 0.1 | 0.2 | 0.2 | 0.1 |
| | L073 | 57.4 | 3.4 | 0.4 | 0.4 | 0.3 | 0.1 |
| | L074 | 64.8 | 2.1 | 0.1 | 0.0 | 0.3 | 0.0 |
| | L019 | 67.3 | 7.0 | 0.3 | 0.0 | 0.2 | 0.0 |
| 400 | L001 | 97.0 | 0.9 | 0.3 | 0.1 | 0.7 | 0.3 |
| | (XTEN control) | | | | | | |
| | L070 | 98.1 | 0.1 | 0.2 | 0.1 | 0.4 | 0.2 |
| | L071 | 97.7 | 0.5 | 0.3 | 0.1 | 0.5 | 0.1 |
| | L072 | 97.6 | 0.6 | 0.2 | 0.0 | 0.3 | 0.0 |
| | L073 | 97.5 | 0.7 | 0.4 | 0.0 | 0.6 | 0.0 |
| | L074 | 96.9 | 0.5 | 0.4 | 0.3 | 0.6 | 0.1 |
| | L019 | 97.4 | 0.3 | 0.3 | 0.2 | 0.2 | 0.2 |

Indels = insertions or deletions.

### Example 28.4. Evaluation of Receptor Knockout by Flow Cytometry

[0702] Seven days post electroporation, T cells were assayed by flow cytometry to evaluate loss of CD3 expression. T cells were incubated with a fixable viability dye (Beckman Coulter, Cat. C36628) and an antibody cocktail targeting the following molecules: CD3 (Biolegend, Cat. 317336), CD4 (Biolegend, Cat. 317434) and CD8 (Biolegend, Cat. 301046). Cells were subsequently washed, analyzed on a Cytoflex LX instrument (Beckman Coulter) using the FlowJo software package. T cells were gated on size, viability and CD8 positivity before expression of any markers was determined. The resulting data was plotted on GraphPad Prism v. 9.0.2 and analyzed using a variable slope (four parameter) non-linear regression.

[0703] As shown in Table 70, treatment with >100 ng of any of base editor mRNA tested resulted in >95% of CD8+ T cells lacking expression of CD3. The EC90s of the base editor mRNAs tested (i.e., mass of mRNA that leads to 90% of CD8+ T cells lacking CD3) with 95% confidence interval of each non-linear regression are shown in Table 71 and FIG. 46.

TABLE 70
Mean percentages of CD8+ T cells that are negative for CD3 surface expression following treatment with base editor
constructs designed with various linker peptides.

| Base editor | L001 (XTEN control) | | L070 | | L071 | | L072 | | L073 | | L074 | | L019 | |
|---|---|---|---|---|---|---|---|---|---|---|---|---|---|---|
| mRNA (ng) | Mean | SD | Mean | SD | Mean | SD | Mean | SD | Mean | SD | Mean | SD | Mean | SD |
| 400.00 | 96.5 | 0.3 | 97.2 | 0.5 | 96.1 | 0.3 | 96.1 | 0.4 | 96.2 | 0.2 | 96.2 | 0.4 | 95.6 | 0.4 |
| 200.00 | 96.8 | 0.8 | 96.4 | 1.8 | 96.7 | 0.8 | 96.8 | 0.9 | 96.1 | 1.0 | 95.7 | 0.9 | 96.2 | 1.0 |
| 100.00 | 97.1 | 0.1 | 96.2 | 1.6 | 97.0 | 0.2 | 95.0 | 1.4 | 96.0 | 0.7 | 96.4 | 0.7 | 95.3 | 0.3 |
| 50.00 | 96.3 | 0.7 | 96.0 | 0.6 | 95.2 | 1.2 | 95.2 | 1.6 | 94.6 | 2.3 | 94.5 | 1.2 | 95.8 | 1.3 |
| 25.00 | 94.9 | 1.5 | 92.8 | 3.4 | 92.1 | 3.7 | 90.7 | 2.4 | 90.7 | 0.3 | 91.5 | 1.2 | 91.7 | 1.1 |
| 12.50 | 91.5 | 1.6 | 85.7 | 5.1 | 82.8 | 5.9 | 83.6 | 4.2 | 82.5 | 2.3 | 79.9 | 0.6 | 85.0 | 1.8 |
| 6.25 | 76.1 | 7.9 | 69.0 | 5.4 | 61.8 | 8.6 | 63.8 | 3.6 | 61.8 | 3.1 | 65.7 | 4.1 | 67.1 | 5.6 |
| 3.13 | 56.5 | 6.2 | 49.0 | 5.5 | 42.6 | 6.3 | 42.2 | 5.7 | 43.0 | 6.7 | 43.7 | 3.2 | 47.7 | 5.5 |
| 1.56 | 37.8 | 2.2 | 29.0 | 4.9 | 26.9 | 2.8 | 24.1 | 5.4 | 24.4 | 3.2 | 25.1 | 2.7 | 29.0 | 3.5 |
| 0.78 | 23.5 | 3.7 | 17.6 | 3.7 | 14.0 | 0.1 | 13.8 | 2.1 | 14.0 | 3.1 | 13.5 | 1.8 | 16.3 | 2.1 |
| 0.39 | 13.2 | 2.9 | 9.0 | 2.3 | 7.6 | 0.8 | 7.7 | 0.5 | 7.0 | 0.3 | 6.5 | 0.7 | 9.0 | 0.9 |
| 0.00 | 1.9 | 0.5 | 1.5 | 0.1 | 1.4 | 0.7 | 2.1 | 1.3 | 1.3 | 0.4 | 1.6 | 0.7 | 2.1 | 0.5 |

TABLE 71
Mass of base editor mRNAs that leads to 90% of the
maximum knockdown of CD3. The 95%
confidence interval for each EC90 value is also shown.

| | EC90 | 95% confidence interval | |
|---|---|---|---|
| Linker | (ng) | Min (ng) | Max (ng) |
| L001 (XTEN control) | 13.4 | 10.6 | 17.5 |
| L070 | 17.1 | 13.6 | 21.9 |
| L071 | 21.5 | 16.6 | 28.7 |
| L072 | 18.9 | 15.5 | 23.5 |
| L073 | 20.7 | 17.1 | 25.5 |
| L074 | 19.7 | 17.2 | 22.6 |
| L019 | 17.6 | 14.6 | 21.5 |

### Example 29. Multiplex Base Editing by Constructs with Various Linker in T Cells

[0704] Select base editor constructs derived from BC22n but with linkers from Table 65 substituted between the cytosine deaminase and Cas9 nickase were assayed for multiple simultaneous base editing efficacy via protein knockdown. Constructs were screened in a 12-point dilution series of base editor mRNA in healthy human T cells, co-delivered with a fixed mass of UGI mRNA (SEQ ID NO: 34) and 4 distinct 91-mer sgRNAs. The potency of each mRNA construct was compared to BC22n mRNA (SEQ ID NO: 1) to evaluate the effects of each linker in terms of phenotypic receptor knockout.

### Example 29.1. T Cell Preparation

[0705] Healthy human donor apheresis was obtained commercially (Hemacare), and cells were washed, re-suspended in CliniMACS® PBS/EDTA buffer (Miltenyi Biotec Cat. 130-070-525) and processed in a MultiMACS™ Cell 24 Separator Plus device (Miltenyi Biotec). T cells were isolated via positive selection using a Straight from Leukopak® CD4/CD8 MicroBead kit, human (Miltenyi Biotec Cat. 130-122-352). T cells were aliquoted and cryopreserved for future use in Cryostor® CS10 (StemCell Technologies Cat. 07930).

[0706] Upon thaw, T cells were plated at a density of 1.0×10\hat{ }6 cells/mL in T cell growth media (TCGM) composed of CTS OpTmizer T Cell Expansion SFM and T Cell Expansion Supplement (ThermoFisher Cat. A1048501), 5% human AB serum (GeminiBio, Cat. 100-512) 1× Penicillin-Streptomycin, 1× Glutamax, 10 mM HEPES, 200 U/mL recombinant human interleukin-2 (Peprotech, Cat. 200-02), 5 ng/ml recombinant human interleukin 7 (Peprotech, Cat. 200-07), and 5 ng/ml recombinant human interleukin 15 (Peprotech, Cat. 200-15). T cells were rested in this media for 24 hours, at which time they were activated with T Cell TransAct™, human reagent (Miltenyi, Cat. 130-111-160) added at a 1:100 ratio by volume. T cells were activated for 48 hours prior to use in screening experiments.

### Example 29.2. T Cell Electroporation and Expansion

[0707] Four 91-mer sgRNAs targeting TRAC (G023520), TRBC1/2 (G023524), CIITA (G023521) and HLA-A (G023523) were denatured for 2 minutes at 95° C., incubated at room temperature for 5 minutes and stored on ice. 48 hours post-activation, T cells were harvested, centrifuged at 500 g for 5 min, and resuspended at a concentration of 12.5×10\hat{ }6 T cells/mL in P3 electroporation buffer (Lonza). For each well to be electroporated, 1×10\hat{ }5 T cells were mixed with a dilution series of base editor mRNAs from 400 ng to 0 ng (SEQ ID NOs: 1 and 321-326), 200 ng of UGI mRNA (SEQ ID NO: 34), 3.6 pmols of G023520 (TRAC), 6.96 pmols of G023524 (TRBC1/2), 17.12 pmols of G023521 (CIITA) and 52.24 pmols of G023523 (HLA-A) in a final volume of 20 uL of P3 electroporation buffer.

[0708] The resulting mix was transferred in duplicate to 96-well Nucleofector™ plates (Lonza) and electroporated using the manufacturer's pulse code. Immediately after electroporation, T cells received 80 μL of TCGM and plates were incubated at 37° C. for 15 minutes. After incubation, 80 μL were transferred to new flat-bottom 96-well plates containing 80 μL of TCGM. T cells were incubated at 37° C. for 4 days, at which time they split 1:4 with fresh TCGM, and incubated at for 3 additional days prior to phenotypic assessments by flow cytometry.

### Example 29.3. Evaluation of Receptor Knockout by Flow Cytometry

[0709] Seven days post electroporation, T cells were assayed by flow cytometry to evaluate loss of CD3, HLA-A3 and/or HLA-DR, DP, DQ. T cells were incubated with a fixable viability dye (Beckman Coulter, Cat. C36628) and an antibody cocktail targeting the following molecules: CD3 (Biolegend, Cat. 317336), CD4 (Biolegend, Cat. 317434), CD8 (Biolegend, Cat. 301046), HLA-A3 (ThermoFisher, Cat. 12-5754-42) and HLA-DP, DQ, DR (Biolegend, Cat. 361714). Cells were subsequently washed, analyzed on a Cytoflex LX instrument (Beckman Coulter) using the FlowJo software package. T cells were gated on size, viability and CD8 positivity before expression of any markers was determined. The resulting data was plotted on GraphPad Prism v. 9.0.2 and analyzed using a variable slope (four parameter) non-linear regression.

[0710] As shown in Table 72 treatment with >100 ng of any of BC22n mRNA tested resulted in >97% of CD8+ T cells lacking expression of CD3, HLA-A3 and HLA-DR, DP, DQ. The EC90s of the base editor mRNAs tested (i.e., mass of mRNA that leads to 90% of CD8+ T cells lacking CD3) with 95% confidence interval of each non-linear regression are shown in Table 73 and FIG. 47.

TABLE 72
Mean percentages of CD8+ T cells that are negative for CD3, HLA-A3 and HLA-DR, DP, DQ surface expression following
treatment with base editor mRNAs.

| | L001 (XTEN control) | | L070 | | L071 | | L072 | | L073 | | L074 | | L019 | |
|---|---|---|---|---|---|---|---|---|---|---|---|---|---|---|
| mRNA (ng) | Mean | SD | Mean | SD | Mean | SD | Mean | SD | Mean | SD | Mean | SD | Mean | SD |
| 400.00 | 97.4 | 0.5 | 98.3 | ND | 98.4 | 0.3 | 98.7 | 0.1 | 97.8 | 0.7 | 98.1 | 0.5 | 98.6 | 0.4 |
| 200.00 | 98.4 | 0.1 | 98.6 | 0.2 | 98.2 | 0.2 | 98.3 | 0.4 | 98.1 | 0.7 | 98.7 | 0.1 | 98.9 | 0.1 |
| 100.00 | 97.1 | 0.8 | 97.5 | 1.1 | 97.0 | 2.1 | 97.7 | 0.5 | 97.4 | 0.5 | 98.5 | 0.5 | 98.7 | 0.1 |
| 50.00 | 95.7 | 0.1 | 96.6 | 0.2 | 95.4 | 0.9 | 95.6 | 0.8 | 95.1 | 2.8 | 97.4 | 0.7 | 97.1 | 0.3 |
| 25.00 | 90.8 | 0.1 | 88.5 | 4.0 | 89.7 | 3.3 | 89.1 | 2.8 | 87.6 | 3.2 | 91.5 | 2.6 | 93.6 | 1.9 |
| 12.50 | 75.5 | 3.2 | 77.8 | 3.7 | 75.6 | 4.8 | 71.6 | 6.6 | 69.1 | 3.2 | 77.9 | 4.7 | 82.6 | 3.3 |
| 6.25 | 54.9 | 4.2 | 54.0 | 1.1 | 54.8 | 6.2 | 53.3 | 5.5 | 46.2 | 5.9 | 55.6 | 7.8 | 60.0 | 5.1 |
| 3.13 | 32.9 | 2.1 | 32.7 | 1.9 | 31.5 | 3.2 | 30.5 | 2.6 | 27.6 | 2.5 | 32.9 | 3.6 | 35.7 | 2.5 |
| 1.56 | 17.1 | 0.5 | 16.6 | 1.6 | 16.3 | 2.4 | 16.1 | 1.6 | 15.5 | 3.1 | 18.4 | 2.5 | 21.0 | 2.1 |
| 0.78 | 10.0 | 1.3 | 9.4 | 1.2 | 9.5 | 0.3 | 7.5 | 0.4 | 7.3 | 0.5 | 9.6 | 2.9 | 11.7 | 0.3 |
| 0.39 | 5.1 | 0.4 | 4.5 | 0.6 | 4.7 | 0.4 | 4.5 | 0.8 | 4.4 | 1.2 | 5.2 | 0.0 | 6.8 | 1.4 |
| 0.00 | 0.2 | 0.1 | 0.1 | 0.1 | 0.2 | 0.1 | 0.1 | 0.1 | 0.3 | 0.2 | 0.2 | 0.2 | 0.2 | 0.1 |

TABLE 73
Mass of base editor mRNAs that leads to 90% of the maximum knockdown
of CD3, HLA-A3 and HLA-DR, DP, DQ (EC90). The 95% confidence interval for each
EC90 value is also shown.

| | EC90 | 95% confidence interval | |
|---|---|---|---|
| Linker | (ng) | Min (ng) | Max (ng) |
| L001 (XTEN control) | 26.3 | 22.9 | 30.4 |
| L070 | 26.5 | 22.8 | 31.1 |
| L071 | 26.4 | 22.0 | 32.1 |
| L072 | 30.3 | 25.1 | 37.3 |
| L073 | 34.3 | 28.3 | 42.4 |
| L074 | 25.0 | 20.4 | 31.2 |
| L019 | 4.709 | 4.314 | 5.130 |

### Example 30 Editing Human T Cells with BC22n, UGI and 91-Mer sgRNAs

[0711] The base editing efficacy of 91-mer sgRNAs as assessed by NGS and/or receptor knockout was compared to that of 100-mer sgRNA controls with the same guides sequences.

[0712] The tested 91-mer sgRNAs include a 20 nucleotide guide sequence (as represented by N) and a guide scaffold as follows: mN*mN*mN*NNNNNNNNNNNNNNNNNGUUUUAGAmGmCmUmAmGmAmAmAmU mAmGmCAAGUUAAAAUAAGGCUAGUCCGUUAUCACGAAAGGGCACCGAGUCG GmUmGmC*mU (SEQ ID NO: 520), where A, C, G, U, and N are adenine, cytosine, guanine, uracil, and any ribonucleotide, respectively, unless otherwise indicated. An m is indicative of a 2′O-methyl modification, and an * is indicative of a phosphorothioate linkage between the nucleotides. Unmodified and modified versions of the guides are provided in Table 5C (Sequence Table).

### Example 30.1. T Cell Preparation

[0713] Healthy human donor apheresis was obtained commercially (Hemacare), and cells were washed, re-suspended in CliniMACS® PBS/EDTA buffer (Miltenyi Biotec Cat. 130-070-525) and processed in a MultiMACS™ Cell 24 Separator Plus device (Miltenyi Biotec). T cells were isolated via positive selection using a Straight from Leukopak® CD4/CD8 MicroBead kit, human (Miltenyi Biotec Cat. 130-122-352). T cells were aliquoted and cryopreserved for future use in Cryostor® CS10 (StemCell Technologies Cat. 07930).

[0714] Upon thaw, T cells were plated at a density of 1.0×10\hat{ }6 cells/mL in T cell growth media (TCGM) composed of CTS OpTmizer T Cell Expansion SFM and T Cell Expansion Supplement (ThermoFisher Cat. A1048501), 5% human AB serum (GeminiBio, Cat. 100-512) 1× Penicillin-Streptomycin, 1× Glutamax, 10 mM HEPES, 200 U/mL recombinant human interleukin-2 (Peprotech, Cat. 200-02), 5 ng/ml recombinant human interleukin 7 (Peprotech, Cat. 200-07), and 5 ng/ml recombinant human interleukin 15 (Peprotech, Cat. 200-15). T cells were rested in this media for 24 hours, at which time they were activated with T Cell TransAct™, human reagent (Miltenyi, Cat. 130-111-160) added at a 1:100 ratio by volume. T cells were activated for 48 hours prior to LNP treatments.

### Example 30.2. T Cell LNP Treatment and Expansion

[0715] Forty-eight hours post-activation, T cells were harvested, centrifuged at 500 g for 5 min, and resuspended at a concentration of 1×10\hat{ }6 T cells/mL in T cell plating media (TCPM): a serum-free version of TCGM containing 400 U/mL recombinant human interleukin-2 (Peprotech, Cat. 200-02), 10 ng/ml recombinant human interleukin 7 (Peprotech, Cat. 200-07), and 10 ng/ml recombinant human interleukin 15 (Peprotech, Cat. 200-15). 50 μL of T cells in TCPM (5×10\hat{ }4 T cells) were added per well to be treated in flat-bottom 96-well plates.

[0716] LNPs were prepared as described in Example 1 at a ratio of 35/47.5/15/2.5 (Lipid A/cholesterol/DSPC/PEG2k-DMG). The LNPs were formulated with a lipid amine to RNA phosphate (N:P) molar ratio of about 6. LNPs encapsulated a single RNA species, either a sgRNA as described in Table 74, BC22n mRNA (SEQ ID No: 1), or UGI mRNA (SEQ ID No. 34).

TABLE 74
100-mer and 91-mer sgRNAs.

| Gene target | 100-mer | 91-mer |
|---|---|---|
| TRAC | G016017 | G023520 |
| TRBC1/2 | G016200 | G023524 |
| CIITA | G016086 | G023521 |
| B2M | G015991 | G023519 |
| CD38 | G019771 | G023522 |
| HLA-A | G021209 | G023523 |

[0717] Prior to T cell treatment, LNPs encapsulating a sgRNA were diluted to 6.64 μg/mL in T cell treatment media (TCTM): a version of TCGM containing 20 ug/mL rhApoE3 in the absence of interleukins 2, 5 or 7. These LNPs were incubated at 37° C. for 15 minutes and serially diluted 1:4 using TCTM, which resulted in an 8-point dilution series ranging from 6.64 μg/mL to zero. Similarly, single-cargo LNPs with BC22n mRNA (SEQ ID NO: 1) or UGI mRNA (SEQ ID NO: 34) were diluted in TCTM to 3.32 and 1.67 μg/mL, respectively, incubated at 37° C. for 15 minutes, and mixed 1:1 by volume with sgRNA LNPs serially diluted in the previous step. Last, 50 μL from the resulting mix was added to T cells in 96-well plates at a 1:1 ratio by volume. T cells were incubated at 37° C. for 24 hours, at which time they were harvested, centrifuged at 500 g for 5 min, resuspended in 200 μL of TCGM and returned to the incubator.

### Example 30.3. Evaluation of Editing Outcomes by Next Generation Sequencing (NGS)

[0718] Four days post-LNP treatment, T cells were subjected to lysis, PCR amplification of each targeted locus and subsequent NGS analysis, as described in Example 1. Tables 75-80 and FIGS. 48, 50A, 50B, 51 show editing levels and the C to T editing purity in T cells treated with a decreasing mass of 100-mer or 91-mer sgRNAs targeting TRAC, TRBC1, TRBC2, CIITA, B2M or CD38.

[0719] When compared to their 100-mer versions, 91-mer sgRNAs resulted in higher editing frequencies when delivered at the same concentration. This result was observed for all 5 different sets of sgRNAs assayed by NGS, which target 6 different genomic loci. No differences in C to T editing purity were observed between 100-mer and 91-mer sgRNAs. The set of sgRNAs targeting the HLA-A gene were evaluated by flow cytometry instead of NGS due to the hyperpolymorphic nature of the HLA-A locus.

TABLE 75
Mean percent editing at the TRAC locus in T cells treated with sgRNAs in the 100-mer
(G016017) or 91-mer format (G023520).

| | TRAC | | | | | | | | | | | |
|---|---|---|---|---|---|---|---|---|---|---|---|---|
| | 100-mer | | | | | | 91-mer | | | | | |
| sgRNA | C to T | | C to A/G | | Indels | | C to T | | C to A/G | | Indels | |
| (ng) | Mean | SD | Mean | SD | Mean | SD | Mean | SD | Mean | SD | Mean | SD |
| 166.00 | 96.7 | 0.4 | 1.0 | 0.2 | 1.5 | 0.3 | 94.9 | 0.0 | 2.2 | 0.2 | 2.5 | 0.3 |
| 41.50 | 98.0 | 0.5 | 0.4 | 0.1 | 0.5 | 0.4 | 97.5 | 0.1 | 0.8 | 0.0 | 1.2 | 0.1 |
| 10.38 | 98.4 | 0.4 | 0.2 | 0.1 | 0.5 | 0.1 | 98.4 | 0.1 | 0.4 | 0.1 | 0.7 | 0.1 |
| 2.59 | 97.2 | 0.1 | 0.3 | 0.1 | 0.4 | 0.1 | 98.2 | 0.2 | 0.3 | 0.1 | 0.5 | 0.0 |
| 0.65 | 78.3 | 0.9 | 0.3 | 0.1 | 0.5 | 0.0 | 92.0 | 0.5 | 0.3 | 0.1 | 0.4 | 0.1 |
| 0.16 | 37.4 | 0.9 | 0.1 | 0.0 | 0.2 | 0.1 | 55.3 | 0.7 | 0.2 | 0.0 | 0.3 | 0.1 |
| 0.04 | 11.6 | 0.9 | 0.2 | 0.1 | 0.1 | 0.1 | 19.4 | 0.9 | 0.2 | 0.1 | 0.2 | 0.1 |
| 0.00 | 0.9 | 0.2 | 0.1 | 0.1 | 0.1 | 0.0 | 0.8 | 0.1 | 0.2 | 0.0 | 0.1 | 0.0 |

TABLE 76
Mean percent editing at the TRBC1 locus in T cells treated with sgRNAs in the 100-mer
(G016200) or 91-mer format (G023524). .

| | TRBC1 | | | | | | | | | | | |
|---|---|---|---|---|---|---|---|---|---|---|---|---|
| | 100-mer | | | | | | 91-mer | | | | | |
| sgRNA | C to T | | C to A/G | | Indels | | C to T | | C to A/G | | Indels | |
| (ng) | Mean | SD | Mean | SD | Mean | SD | Mean | SD | Mean | SD | Mean | SD |
| 166.00 | 95.1 | 0.5 | 1.3 | 0.2 | 1.9 | 0.2 | 91.6 | 1.0 | 3.4 | 0.1 | 4.0 | 0.8 |
| 41.50 | 96.2 | 0.8 | 0.6 | 0.1 | 1.3 | 0.3 | 95.3 | 0.6 | 1.5 | 0.2 | 2.1 | 0.3 |
| 10.38 | 94.6 | 0.6 | 0.4 | 0.1 | 1.0 | 0.2 | 96.0 | 0.4 | 0.8 | 0.2 | 1.1 | 0.1 |
| 2.59 | 83.5 | 0.7 | 0.5 | 0.1 | 0.7 | 0.3 | 92.1 | 0.6 | 0.6 | 0.1 | 0.9 | 0.5 |
| 0.65 | 48.1 | 2.0 | 0.4 | 0.1 | 0.3 | 0.1 | 69.8 | 0.1 | 0.4 | 0.2 | 0.4 | 0.2 |
| 0.16 | 17.3 | 0.7 | 0.3 | 0.1 | 0.3 | 0.4 | 34.0 | 0.5 | 0.4 | 0.0 | 0.3 | 0.1 |
| 0.04 | 6.2 | 1.2 | 0.3 | 0.1 | 0.2 | 0.1 | 10.9 | 0.7 | 0.5 | 0.1 | 0.1 | 0.1 |
| 0.00 | 1.3 | 0.1 | 0.4 | 0.1 | 0.2 | 0.1 | 1.2 | 0.4 | 0.3 | 0.2 | 0.1 | 0.1 |

TABLE 77
Mean percent editing at the TRBC2 locus in T cells treated with sgRNAs in the 100-mer
(G016200) or 91-mer format (G023524).

| | TRBC2 | | | | | | | | | | | |
|---|---|---|---|---|---|---|---|---|---|---|---|---|
| | 100-mer | | | | | | 91-mer | | | | | |
| sgRNA | C to T | | C to A/G | | Indels | | C to T | | C to A/G | | Indels | |
| (ng) | Mean | SD | Mean | SD | Mean | SD | Mean | SD | Mean | SD | Mean | SD |
| 166.00 | 96.5 | 0.1 | 1.2 | 0.3 | 1.3 | 0.3 | 92.4 | 0.4 | 3.2 | 0.1 | 3.7 | 0.3 |
| 41.50 | 97.3 | 0.5 | 0.7 | 0.0 | 0.9 | 0.0 | 96.1 | 0.3 | 1.3 | 0.1 | 1.7 | 0.5 |
| 10.38 | 95.3 | 0.9 | 0.6 | 0.2 | 1.0 | 0.1 | 97.1 | 0.1 | 0.6 | 0.1 | 1.2 | 0.2 |
| 2.59 | 78.3 | 1.4 | 0.6 | 0.0 | 0.6 | 0.1 | 92.8 | 0.8 | 0.7 | 0.1 | 0.7 | 0.2 |
| 0.65 | 41.1 | 1.1 | 0.3 | 0.0 | 0.4 | 0.1 | 66.5 | 2.0 | 0.4 | 0.3 | 0.5 | 0.2 |
| 0.16 | 13.9 | 1.5 | 0.3 | 0.1 | 0.2 | 0.0 | 29.7 | 2.5 | 0.3 | 0.2 | 0.3 | 0.2 |
| 0.04 | 5.1 | 0.7 | 0.3 | 0.0 | 0.3 | 0.1 | 10.3 | 0.5 | 0.4 | 0.1 | 0.3 | 0.1 |
| 0.00 | 1.5 | 0.4 | 0.4 | 0.1 | 0.2 | 0.1 | 1.8 | 0.3 | 0.4 | 0.1 | 0.2 | 0.1 |

TABLE 78
Mean percent editing at the CIITA locus in T cells treated with sgRNAs in the 100-mer
(G016086) or 91-mer format (G023521).

| | CIITA | | | | | | | | | | | |
|---|---|---|---|---|---|---|---|---|---|---|---|---|
| | 100-mer | | | | | | 91-mer | | | | | |
| sgRNA | C to T | | C to A/G | | Indels | | C to T | | C to A/G | | Indels | |
| (ng) | Mean | SD | Mean | SD | Mean | SD | Mean | SD | Mean | SD | Mean | SD |
| 166.00 | 98.1 | 0.2 | 0.7 | 0.1 | 0.6 | 0.1 | 96.9 | 0.3 | 1.3 | 0.0 | 1.4 | 0.2 |
| 41.50 | 97.3 | 0.2 | 0.4 | 0.1 | 0.3 | 0.1 | 98.1 | 0.2 | 0.6 | 0.1 | 0.8 | 0.1 |
| 10.38 | 82.9 | 0.3 | 0.3 | 0.0 | 0.2 | 0.1 | 97.5 | 0.4 | 0.5 | 0.2 | 0.4 | 0.1 |
| 2.59 | 43.3 | 0.5 | 0.3 | 0.1 | 0.2 | 0.1 | 88.0 | 1.1 | 0.4 | 0.1 | 0.3 | 0.1 |
| 0.65 | 14.5 | 0.9 | 0.3 | 0.1 | 0.1 | 0.1 | 50.4 | 1.9 | 0.3 | 0.1 | 0.1 | 0.1 |
| 0.16 | 4.3 | 0.2 | 0.2 | 0.1 | 0.0 | 0.0 | 17.7 | 0.5 | 0.3 | 0.0 | 0.1 | 0.1 |
| 0.04 | 1.8 | 0.2 | 0.3 | 0.1 | 0.1 | 0.0 | 5.7 | 0.1 | 0.2 | 0.1 | 0.1 | 0.0 |
| 0.00 | 0.6 | 0.1 | 0.2 | 0.1 | 0.1 | 0.0 | 0.8 | 0.0 | 0.2 | 0.1 | 0.1 | 0.0 |

TABLE 79
Mean percent editing at the B2M locus in T cells treated with sgRNAs in the 100-mer
(G015991) or 91-mer format (G023519).

| | B2M | | | | | | | | | | | |
|---|---|---|---|---|---|---|---|---|---|---|---|---|
| | 100-mer | | | | | | 91-mer | | | | | |
| sgRNA | C to T | | C to A/G | | Indels | | C to T | | C to A/G | | Indels | |
| (ng) | Mean | SD | Mean | SD | Mean | SD | Mean | SD | Mean | SD | Mean | SD |
| 166.00 | 92.5 | 0.3 | 4.2 | 0.2 | 2.8 | 0.4 | 89.0 | 0.9 | 6.9 | 0.5 | 3.8 | 0.3 |
| 41.50 | 97.2 | 0.2 | 1.3 | 0.2 | 1.1 | 0.1 | 96.1 | 0.4 | 2.1 | 0.1 | 1.5 | 0.4 |
| 10.38 | 97.6 | 0.4 | 0.6 | 0.1 | 0.9 | 0.1 | 97.7 | 0.1 | 0.8 | 0.0 | 1.0 | 0.1 |
| 2.59 | 96.8 | 0.1 | 0.5 | 0.0 | 0.7 | 0.1 | 97.9 | 0.1 | 0.6 | 0.0 | 0.6 | 0.1 |
| 0.65 | 79.5 | 0.9 | 0.3 | 0.0 | 0.3 | 0.0 | 90.3 | 0.3 | 0.4 | 0.0 | 0.5 | 0.1 |
| 0.16 | 39.8 | 0.3 | 0.3 | 0.0 | 0.2 | 0.1 | 54.1 | 0.4 | 0.3 | 0.1 | 0.2 | 0.0 |
| 0.04 | 13.9 | 0.3 | 0.3 | 0.1 | 0.1 | 0.0 | 20.8 | 0.8 | 0.3 | 0.0 | 0.1 | 0.1 |
| 0.00 | 2.1 | 0.2 | 0.3 | 0.0 | 0.1 | 0.0 | 2.0 | 0.4 | 0.3 | 0.0 | 0.1 | 0.0 |

TABLE 80
Mean percent editing at the CD38 locus in T cells treated with sgRNAs in the 100-mer
(G019771) or 91-mer format (G023522).

| | CD38 | | | | | | | | | | | |
|---|---|---|---|---|---|---|---|---|---|---|---|---|
| | 100-mer | | | | | | 91-mer | | | | | |
| sgRNA | C to T | | C to A/G | | Indels | | C to T | | C to A/G | | Indels | |
| (ng) | Mean | SD | Mean | SD | Mean | SD | Mean | SD | Mean | SD | Mean | SD |
| 166.00 | 92.7 | 0.6 | 1.6 | 0.2 | 5.4 | 0.4 | 91.0 | 0.6 | 2.5 | 0.2 | 6.1 | 0.5 |
| 41.50 | 93.9 | 0.4 | 0.7 | 0.1 | 5.1 | 0.3 | 93.4 | 0.5 | 1.0 | 0.0 | 5.2 | 0.5 |
| 10.38 | 93.7 | 0.1 | 0.7 | 0.1 | 4.8 | 0.2 | 94.0 | 0.4 | 0.6 | 0.1 | 4.6 | 0.2 |
| 2.59 | 88.4 | 0.9 | 0.5 | 0.1 | 3.3 | 0.3 | 92.4 | 0.7 | 0.6 | 0.1 | 3.8 | 0.3 |
| 0.65 | 54.8 | 1.6 | 0.4 | 0.0 | 1.9 | 0.3 | 67.3 | 0.3 | 0.4 | 0.1 | 2.3 | 0.0 |
| 0.16 | 19.7 | 0.4 | 0.5 | 0.1 | 0.7 | 0.1 | 27.8 | 0.4 | 0.5 | 0.1 | 1.0 | 0.2 |
| 0.04 | 5.9 | 0.5 | 0.5 | 0.0 | 0.3 | 0.1 | 9.1 | 0.6 | 0.4 | 0.1 | 0.4 | 0.1 |
| 0.00 | 0.4 | 0.0 | 0.4 | 0.1 | 0.1 | 0.0 | 0.5 | 0.1 | 0.4 | 0.0 | 0.0 | 0.0 |

### Example 30.4. Evaluation of Receptor Knockout by Flow Cytometry

[0720] Seven days post LNP treatment, T cells were assayed by flow cytometry to evaluate receptor knockout. T cells were incubated with a fixable viability dye (Beckman Coulter, Cat. C36628) and an antibody cocktail targeting the following molecules: CD3 (Biolegend, Cat. 317336), CD4 (Biolegend, Cat. 317434) and CD8 (Biolegend, Cat. 301046), B2M (Biolegend, Cat. 316306), CD38 (Biolegend, Cat. 303516), HLA-A2 (Biolegend, Cat. 343304) and HLA-DR, DP, DQ (Biolegend, Cat. 361714). Cells were subsequently washed, analyzed on a Cytoflex LX instrument (Beckman Coulter) using the FlowJo software package. T cells were gated on size, viability and CD8 positivity before expression of any markers was determined. The resulting data was plotted on GraphPad Prism v. 9.0.2 and analyzed using a variable slope (four parameter) non-linear regression.

[0721] As shown in Tables 81-83 and FIGS. 52, 53A-55B, all 91-mer sgRNAs tested outperformed their 100-mer versions. As show in Table 84, this increase in potency was variable, with a 4.6-fold increase observed for CIITA and a 1.14-fold increase observed for B2M. Among the 6 targets tested, those with a lower potency (i.e., higher EC50) in the 100-mer format (CIITA and HLA-A) seem to benefit the most from usage of 91-mer sgRNAs.

TABLE 81
Mean percentage of CD8+ T cells that are negative for CD3 surface receptors
following sgRNA targeting TRAC or TRBC1/2 in the 100-mer or 91-mer formats.

| | TRAC (CD3-) | | | | | TRBC1/2 (CD3-) | | | |
|---|---|---|---|---|---|---|---|---|---|
| sgRNA | 100-mer | | 91-mer | | sgRNA | 100-mer | | 91-mer | |
| (ng) | Mean | SD | Mean | SD | (ng) | Mean | SD | Mean | SD |
| 166.00 | 98.4 | 0.3 | 98.2 | 0.3 | 166.00 | 99.6 | 0.3 | 99.1 | 0.3 |
| 41.50 | 98.1 | 0.1 | 98.5 | 0.5 | 41.50 | 99.8 | 0.1 | 99.6 | 0.1 |
| 10.38 | 97.7 | 0.2 | 98.0 | 0.4 | 10.38 | 98.8 | 0.4 | 99.9 | 0.1 |
| 2.59 | 95.2 | 0.4 | 97.4 | 0.6 | 2.59 | 84.9 | 1.1 | 97.4 | 0.6 |
| 0.65 | 74.7 | 1.0 | 88.0 | 0.8 | 0.65 | 45.7 | 1.6 | 73.5 | 2.8 |
| 0.16 | 33.5 | 2.4 | 51.0 | 1.0 | 0.16 | 16.4 | 0.9 | 31.6 | 0.8 |
| 0.04 | 11.0 | 0.7 | 18.3 | 0.8 | 0.04 | 5.5 | 0.4 | 10.2 | 0.5 |
| 0.00 | 1.1 | 0.2 | 1.3 | 0.2 | 0.00 | 1.2 | 0.2 | 1.2 | 0.1 |

TABLE 82
Mean percentage of CD8+ T cells that are negative for HLA-DR, DP, DQ or
HLA-A2 surface receptors following treatment sgRNA targeting CIITA or HLA-A,
respectively, in the 100-mer or 91-mer formats.

| | CIITA (HLA-DR, DP, DQ-) | | | | | HLA-A (HLA-A2-) | | | |
|---|---|---|---|---|---|---|---|---|---|
| sgRA | 100-mer | | 91-mer | | sgRNA | 100-mer | | 91-mer | |
| (ng) | Mean | SD | Mean | SD | (ng) | Mean | SD | Mean | SD |
| 166.00 | 98.3 | 0.2 | 98.7 | 0.2 | 166.00 | 98.8 | 0.1 | 99.6 | 0.2 |
| 41.50 | 96.9 | 0.7 | 98.4 | 0.3 | 41.50 | 93.6 | 0.8 | 99.2 | 0.4 |
| 10.38 | 85.2 | 0.7 | 97.7 | 0.3 | 10.38 | 70.2 | 1.0 | 93.8 | 1.4 |
| 2.59 | 58.7 | 0.2 | 89.4 | 1.3 | 2.59 | 34.0 | 2.1 | 63.2 | 3.0 |
| 0.65 | 44.8 | 1.1 | 63.4 | 0.5 | 0.65 | 12.1 | 1.3 | 28.5 | 1.2 |
| 0.16 | 38.2 | 1.6 | 45.2 | 2.6 | 0.16 | 3.3 | 0.2 | 8.3 | 0.6 |
| 0.04 | 37.8 | 1.0 | 38.2 | 0.5 | 0.04 | 0.9 | 0.3 | 2.6 | 0.5 |
| 0.00 | 35.1 | 2.5 | 37.6 | 1.7 | 0.00 | 0.1 | 0.0 | 0.3 | 0.2 |

TABLE 83
Mean percentage of CD8+ T cells that are negative for B2M or CD38 surface
receptors following treatment with sgRNAs targeting B2M or CD38, respectively in the
100-mer or 91-mer formats.

| | B2M (B2M-) | | | | | CD38 (CD38-) | | | |
|---|---|---|---|---|---|---|---|---|---|
| sgRNA | 100-mer | | 91-mer | | sgRNA | 100-mer | | 91-mer | |
| (ng) | Mean | SD | Mean | SD | (ng) | Mean | SD | Mean | SD |
| 166.00 | 98.0 | 0.4 | 98.3 | 0.2 | 166.00 | 99.8 | 0.2 | 99.8 | 0.1 |
| 41.50 | 98.2 | 0.0 | 98.4 | 0.4 | 41.50 | 99.6 | 0.1 | 99.9 | 0.1 |
| 10.38 | 94.5 | 0.7 | 97.2 | 0.3 | 10.38 | 98.4 | 0.3 | 99.5 | 0.1 |
| 2.59 | 68.3 | 3.2 | 81.4 | 3.4 | 2.59 | 87.4 | 1.9 | 94.3 | 0.9 |
| 0.65 | 8.4 | 6.8 | 11.4 | 2.6 | 0.65 | 47.0 | 4.3 | 60.0 | 1.9 |
| 0.16 | 0.4 | 0.3 | 0.5 | 0.1 | 0.16 | 20.5 | 4.9 | 23.8 | 1.6 |
| 0.04 | 0.4 | 0.6 | 0.2 | 0.1 | 0.04 | 16.5 | 10.1 | 12.5 | 0.6 |
| 0.00 | 0.9 | 0.7 | 1.6 | 0.9 | 0.00 | 17.2 | 4.1 | 13.7 | 0.7 |

TABLE 84
Amount (pmol) of sgRNAs that lead to a 50% loss of receptor expression in
the surface of CD8 + T cells (EC50s). The far right column shows the fold-increase in
potency achieved by 91-mer sgRNAs when compared to their 100-mer with the same
guide sequence.

| | | | | | EC50 shift |
|---|---|---|---|---|---|
| | 100-mer | | 91-mer | | (100-mer/91- |
| Gene target | sgRNA ID | EC50 (pmols) | sgRNA ID | EC50 (pmols) | mer) |
| TRAC | G016017 | 0.008 | G023520 | 0.005 | 1.63 |
| TRBC1/2 | G016200 | 0.023 | G023524 | 0.010 | 2.22 |
| CIITA | G016086 | 0.123 | G023521 | 0.027 | 4.60 |
| B2M | G015991 | 0.055 | G023519 | 0.048 | 1.14 |
| CD38 | G019771 | 0.027 | G023522 | 0.020 | 1.41 |
| HLA-A | G021209 | 0.150 | G023523 | 0.053 | 2.81 |

### Example 31 Base Editing Impact of UGI mRNA Dose on In-Vivo Editing

[0722] In vivo liver editing profiles were evaluated using fixed doses of BC22n (SEQ ID No: 1) and guide RNA targeting ANAPC5 (G019427) along with a serial dilution of UGI mRNA (SEQ ID No: 34).

### Example 31.1 In Vivo Editing as Assayed by NGS

[0723] Fifteen commercially available CD-1 female mice ranging from 6-10 weeks of age (n=3 per group) were used in this study. Animals were weighed pre-dose for dosing calculations. Each RNA species was formulated separately in an LNP. LNPs were formulated generally as described in Example 1. LNPs contained ionizable Lipid A, cholesterol, DSPC, and PEG2k-DMG in a 50:38:9:3 molar ratio, respectively. The lipid nucleic acid assemblies were formulated with a lipid amine to RNA phosphate (N:P) molar ratio of about 6. LNPs encapsulated a single RNA species, either G019427, BC22n mRNA (SEQ ID No: 1), or UGI mRNA (SEQ ID No. 34).

[0724] LNPs encapsulating base editor mRNA and LNPs encapsulating sgRNA were mixed and administered simultaneously at fixed doses of 0.2 mpk and 0.1 mpk RNA by weight, respectively (editor mRNA and sgRNA) along with UGI mRNA doses of either 0.0, 0.03, 0.1, and 0.3 mpk RNA by weight. The negative control group was dosed with TSS buffer only. Formulations were administered intravenously via tail vein injection according to the doses listed in Table 85.

TABLE 85
Animal groups and the respective LNPs

| | | Editor | | UGI |
|---|---|---|---|---|
| | | mRNA | sgRNA | mRNA |
| Sample | LNP cargos | (mg/kg) | (mg/kg) | (mg/kg) |
| TSS | None | 0 | 0 | 0 |
| 0.0 MPK UGI | BC22n mRNA | 0.2 mg/kg | 0.1 mg/kg | n/a |
| 0.03 MPK UGI | UGI mRNA | | | 0.03 mg/kg |
| 0.1 MPK UGI | G019427 | | | 0.1 mg/kg |
| 0.3 MPK UGI | | | | 0.3 mg/kg |

[0725] Animals were periodically observed for adverse effects for at least 24 hours post-dose. Six days after treatment, animals were euthanized by cardiac puncture under isoflurane anesthesia; liver tissue were collected for downstream analysis. Liver punches weighing between 5 and 15 mg were collected for isolation of genomic DNA. Genomic DNA samples were analyzed with NGS sequencing as described in Example 1. Editing data and percent C to T purity are shown in Table 86 and FIGS. 56-57.

TABLE 86
Mean percent editing at the ANAPC5 locus in mouse liver with
increasing amounts of UGI mRNA.

| UGI | | | | | | | % C to T | |
|---|---|---|---|---|---|---|---|---|
| mRNA | % C to T | | % C to A/G | | Indel | | Purity | |
| (mpK) | Mean | SD | Mean | SD | Mean | SD | Mean | SD |
| TSS | 0.10 | 0.00 | 0.71 | 0.03 | 0.11 | 0.10 | 11.01 | 0.38 |
| 0 | 25.77 | 4.18 | 21.64 | 1.52 | 24.29 | 26.51 | 34.80 | 4.90 |
| 0.03 | 68.20 | 2.38 | 2.30 | 0.54 | 4.11 | 4.02 | 91.50 | 1.27 |
| 0.1 | 67.47 | 0.55 | 2.04 | 0.25 | 3.92 | 3.71 | 92.15 | 0.39 |
| 0.3 | 66.67 | 0.67 | 2.17 | 0.14 | 3.88 | 3.63 | 91.99 | 0.66 |

### Example 32. Determination of BC22n to UGI Ratio In Vitro

[0726] Protein expression levels are determined using HiBiT tagged versions of a protein. To determine the relative amounts of base editor protein and UGI protein expressed for efficient base editing with high C to T purity, parallel editing experiments are performed one of which uses an mRNA encoding a HiBiT-tagged base editor and the other of which uses an mRNA encoding a HiBiT-tagged UGI.

[0727] Cell preparation, engineering and editing assays are performed as in Example 9. One arm of the experiment (editor tagged) transfects with an mRNA encoding a HiBiT-tagged BC22n (SEQ ID No. 4) and an mRNA UGI (SEQ ID No: 34). Another arm of the experiment (UGI tagged) transfects with an mRNA encoding base editor (SEQ ID No: 1) and an mRNA encoding a Hibit-tagged UGI.

[0728] Twenty-four hours after transfection, the number of live T cells per sample is determined using a cell titer-glo assay (Promega Cat No. G7571) and the number of HiBiT tagged proteins is measured using a Nano-Glo® HiBiT lytic detection assay (Promega Cat No. N3040). NGS sequencing is performed 96 hours post-transfection to assess total editing and C to T purity levels. BC22n and UGI protein levels is plotted against total editing levels to determine the minimum number of each proteins cell that is required to achieve saturating editing levels and C to T purity.

[0729] The optimal ratio of BC22n to UGI proteins is calculated by dividing the minimum number of BC22 proteins per cell that is required to achieve saturating editing levels by the minimum number of UGI proteins per cell that is required to achieve maximum C to T purity.

[0730] Similar methods could be used to calculate the ratio of base editor to UGI protein that use different cell types, different guides, or different transfection methods.

### Example 33. In Vivo UGI Titration with Lower Doses

[0731] Base editing is performed in mice to assess overall editing efficiency and C to T purity with lower levels of UGI mRNA. Experimental details are as described in Example 30 with the following exceptions. LNPs encapsulating BC22n mRNA and LNPs encapsulating sgRNA are mixed at fixed doses of 0.2 mg/kg and 0.1 mg/kg of RNA cargos respectively, and combined with UGI mRNA doses of either 0.0, 0.0001, 0.001, 0.003, 0.01 0.03, 0.1, and 0.3 mg/kg. The negative control group is a TSS treated animal. Formulations are administered intravenously via tail vein injection. Six days after treatment, animals are euthanized by cardiac puncture under isoflurane anesthesia; liver tissue are collected for downstream analysis. Liver punches weighing between 5 and 15 mg are collected for isolation of genomic DNA and total RNA. Genomic DNA samples are analyzed with NGS sequencing as described in Example 1 to determine the minimum UGI mRNA dose required for maximum C-to-T editing purity in mouse liver.

### Example 34. Cytotoxic Susceptibility of Engineered T Cells

[0732] Engineered T cells are assayed for cytotoxic susceptibility when targeted by natural killer (NK) cells.

[0733] NK cells (Stemcell Technologies) are thawed and resuspended at a cell concentration of 1×10\hat{ }6 cells/ml into T cell growth media (TCGM) composed of OpTmizer TCGM and further supplemented with 100 U/mL of recombinant human interleukin-2 (Peprotech, Cat. 200-02), 5 ng/ml IL-7 (Peprotech, Cat. 200-07), 5 ng/ml IL-15 (Peprotech, Cat. 200-15). Cells are incubated at 37° C. for 24 hours.

[0734] Twenty-four hours post thaw, the NK cells are labelled with 0.5 μM Cell Trace Violet as follows: a vial of Cell Trace Violet (CellTrace™ Violet Cell Proliferation Kit, for flow cytometry, Cat. C34571) is reconstituted in DMSO from the kit to give a 5 mM stock concentration. Two μL of CTV stock is diluted with 18 μL Phosphate-Buffered Saline (Corning, Cat. 21-040-CV) to obtain a concentration of 0.5 mM. NK cells are centrifuged at 500×g for 5 minutes, the media is aspirated, and cells are resuspended in Phosphate-Buffered Saline (PBS) at a concentration of 1×10\hat{ }6 cells/mL such that the final concentration of CTV dye is 0.5 μM. The cells are mixed with CTV (Cell Trace Violet) dye solution incubated at 37° C. for 20 minutes. Unbound dye is quenched by the addition of TCGM and incubated for 5 minutes. The cells are centrifuged at 500×g for 5 minutes. Cells are resuspended in TCGM supplemented with 100 U/mL of recombinant human interleukin-2 (Peprotech, Cat. 200-02), 5 ng/ml IL-7 (Peprotech, Cat. 200-07), 5 ng/ml IL-15 (Peprotech, Cat. 200-15) at a concentration of 2×10\hat{ }6 cells/mL. To test a range of effector:target (E:T) ratios, CTV-labelled NK cells aliquoted in 100 ul of media in a 6 point, 2 fold serial dilution with the highest number of cells being 2×10\hat{ }5 cells Media only samples are included as negative controls.

[0735] T cells are engineered using BC22n and UGI mRNA as described in Example 14 using the G023523 targeting HLA-A or G015991 targeting B2M. Unedited (WT) T cells, Unstained, LD heat killed and 7-AAD FMO (2×10\hat{ }⁴ unlabelled NK cells and 2×10\hat{ }⁴ WT T cells) and CTV+ (2×10\hat{ }5 CTV labelled NK cells) are also included as controls. T cells are resuspended at a density of 2×10\hat{ }5 cells of TCGM composed of OpTmizer TCGM and further supplemented with 100 U/mL of recombinant human interleukin-2 (Peprotech, Cat. 200-02), 5 ng/ml IL-7 (Peprotech, Cat. 200-07), 5 ng/ml IL-15 (Peprotech, Cat. 200-15). Twenty thousand T cells are added each well of NK cells and media controls. Cells are incubated at 37° C. for 24 hours.

[0736] At twenty-four hours, half of the volume of the cells from the LD Heat Killed well are heat killed and transferred back to the same well in the assay plate. Cells are centrifuged and resuspended in in 80 μL of a 1:200 v/v solution of 7-AAD (BD Biosciences, Cat. 559925) in FACS buffer (PBS+2% FBS (Gibco, Cat. A31605-02)+2 mM EDTA (Invitrogen, Cat. 15-575-020). Data for specific lysis of T cells is acquired by flow cytometry using a Cytoflex LX instrument (Beckman Coulter) and analyzed using the FlowJo software package. Gates are first drawn on the CTV negative population to gate out the NK cells, followed by gating on singlets after which a gate is drawn on the 7-AAD negative population to gate for the live T cells. The percent lysis of T cells is calculated by subtracting the live cell percentage from 100.

### Example 35. This Paragraph is Intentionally Left Blank

### Example 36. Protein Expression of Base Editor and UGI in Primary Human Hepatocytes

[0737] Base editing was performed with mRNAs encoding proteins with fused HiBiT tags in primary human hepatocytes to determine the relative amounts of base editor and UGI protein enzymatic units appropriate for high efficiency editing with high C to T purity.

[0738] Messenger RNAs encoding BC22n with a C-terminal HiBiT tag (BC22n-HiBIT, SEQ ID NO: 4), BC22-2XUGI (2 tandem copies of UGI in cis) with a C-terminal HiBiT tag (BC22-2XUGI-HibIT, SEQ ID NO: 314), and UGI with a C-terminal HiBiT tag (UGI-HiBiT, SEQ ID NO: 316), were transfected into primary human hepatocytes (PHH) in dose response with a fixed concentration of a guide RNA targeting B2M (G015991; SEQ ID NO: 179) to determine the minimum number of intracellular base editor and UGI protein copies to perform base editing with high activity (total editing %=2×EC90) and high C-to-T purity (C to T purity %=2×EC90). BC22n-HiBiT was titrated across fixed concentrations of B2M guide and UGI (SEQ ID NO: 34), UGI-HiBiT was titrated across fixed concentrations of B2M guide and BC22n (SEQ ID NO: 1), and BC22-2XUGI-HiBiT was titrated across a fixed concentration of B2M guide without any additional UGI mRNA in trans. A HiBiT lytic assay (Promega cat #N3040) was performed twenty hours post transfection to determine intracellular protein levels at an early timepoint. Those protein levels were then related to endpoint editing at the B2M locus, derived from NGS data, ninety-six hours post transfection.

### Example 36.1 Cell Preparation and Transfection

[0739] PHH cells (ThermoFisher, Lot HU8284) were thawed and recovered in CHRMs media (Gibco, cat #CM7000). Cells were resuspended in Primary Hepatocyte Plating Media (Consisting of William's E media (Gibco, Cat #A1217601) and primary hepatocyte plating supplements (Gibco, Cat #CM3000)) before being plated in collagen-coated 96-well plates at a density of 30,000 cells/well for twenty-four hours. Cells were washed, and fresh primary hepatocyte maintenance media was added.

[0740] Lipofection reagent was prepared as described in Example 1, with a molar ratio of 50/9/38/3 of Lipid A, DSPC, cholesterol, and PEG2k-DMG respectively. Each RNA species (base editor mRNA, UGI mRNA, or gRNA G015991 (SEQ ID NO: 179)) was individually bulk-mixed with lipofection reagent at a lipid amine to RNA phosphate (N:P) molar ratio of about 6. The resulting bulk-mixed lipoplex material was pre-incubated with 10% FBS (Gibco, Cat #A3160501) in Primary Hepatocyte Maintenance Media (Consisting of William's E media (Gibco, Cat #A1217601) and primary hepatocyte maintenance supplements (Gibco, Cat #CM4000)), for 15 minutes before addition to hepatocytes.

[0741] For the BC22n-HiBiT titration, each well received three components in a final volume of 100 uL: BC22n-HiBiT mRNA ranging from 100 ng to 0 ng, 11 ng of UGI mRNA and 2 pmols of G015991 (B2M) as described in Table 87. For the UGI-HiBiT titration each well received three components in a final volume of 100 uL: UGI-HiBiT mRNA ranging from 100 ng to 0 ng, 33 ng of BC22n mRNA and 2 pmols of G015991 (B2M) as described in Table 88. For the BC22-2XUGI-HiBiT titration each well received three components in a final volume of 100 uL: BC22-2XUGI-HiBiT mRNA ranging from 100 ng to 0 ng, 11 ng of UGI mRNA and 2 pmols of G015991 (B2M) as described in Table 89.

[0742] Ninety-six hours post transfection, separate PHH replicate plates that had been transfected at the same time as the HiBiT plates were subjected to lysis, PCR amplification of the B2M locus, and subsequent NGS analysis, as described in Example 1. All experiments were performed in biological triplicate. Background C-to-T, C-to-A/G and indel edits (all <2%) were subtracted from all wells by calculating the average background rates from a set of untreated wells. Editing results for different BC22n-HiBiT mRNA concentrations are shown in Table 87, and total editing at different BC22n-HiBiT mRNA concentrations are shown in FIG. 58A. Editing results for different UGI-HiBiT mRNA concentrations are shown in Table 88 and C-to-T purity at different UGI-HiBiT mRNA concentrations are shown in FIG. 58B. Editing results for different BC22-2XUGI-HiBiT sRNA concentrations are shown in Table 89. Total editing and C-to-T purity with different BC22-2XUGI-HiBiT mRNA concentrations are shown in FIG. 58C and FIG. 58D, respectively.

[0743] To facilitate comparisons between mRNAs of different sizes, all figures display mRNA doses in terms of molarity. For these purposes, the molecular weight of BC22n mRNA was considered as 1,724.25 kDa, BC22-2X-UGI mRNA as 1915.12 kDa, UGI mRNA as 287.58 kDa and sgRNAs as 29.66 kDa. The addition of a HiBiT tag to any miRNA increased its molecular weight by 18.24 kDa.

TABLE 87
Mean editing in PHH with increasing doses of BC22n-HiBiT mRNA.

| | | | | | | | | | Total | | C-to-T | |
|---|---|---|---|---|---|---|---|---|---|---|---|---|
| Dose | Dose | | C-to-T | | C-to-A/G | | Indels | | editing | | purity | |
| (ng) | (nM) | n | Mean | SD | Mean | SD | Mean | SD | Mean | SD | Mean | SD |
| 100.00 | 0.2857 | 3 | 84.87 | 1.37 | 0.95 | 0.28 | 0.80 | 0.61 | 86.74 | 1.83 | 97.99 | 0.93 |
| 33.00 | 0.0952 | 3 | 78.63 | 0.70 | 0.73 | 0.19 | 0.93 | 0.29 | 80.08 | 0.94 | 97.93 | 0.50 |
| 11.00 | 0.0317 | 3 | 66.33 | 3.72 | 0.46 | 0.24 | 0.72 | 0.39 | 67.19 | 3.67 | 98.27 | 0.39 |
| 3.70 | 0.0106 | 3 | 45.33 | 1.25 | 0.19 | 0.21 | 0.40 | 0.21 | 46.43 | 1.70 | 98.72 | 0.25 |
| 1.23 | 0.0035 | 3 | 26.57 | 0.99 | 0.32 | 0.29 | 0.90 | 0.58 | 26.92 | 1.29 | 95.69 | 2.67 |
| 0.41 | 0.0012 | 3 | 11.77 | 0.61 | 0.12 | 0.21 | 0.03 | 0.05 | 11.96 | 0.72 | 98.75 | 1.55 |
| 0.14 | 0.0004 | 3 | 5.43 | 0.85 | 0.00 | 0.00 | 0.08 | 0.14 | 5.47 | 0.82 | 98.58 | 2.45 |
| 0.00 | 0.0000 | 3 | 0.09 | 0.13 | 0.07 | 0.13 | 0.03 | 0.03 | 1.25 | 0.55 | NA | NA |

TABLE 88
Mean editing in PHH with increasing doses of UGI-Hibit mRNA.

| | | | | | | | | | Total | | C-to-T | |
|---|---|---|---|---|---|---|---|---|---|---|---|---|
| Dose | Dose | | C-to-T | | C-to-A/G | | Indels | | editing | | purity | |
| (ng) | (nM) | n | Mean | SD | Mean | SD | Mean | SD | Mean | SD | Mean | SD |
| 100.00 | 1.6400 | 3 | 81.10 | 3.33 | 0.80 | 0.13 | 1.09 | 0.42 | 83.32 | 3.34 | 97.74 | 0.52 |
| 25.00 | 0.4100 | 1 | 80.73 | 2.17 | 0.52 | 0.32 | 1.43 | 0.11 | 82.40 | 1.81 | 97.64 | 0.49 |
| 6.25 | 0.1025 | 3 | 77.10 | 3.71 | 0.64 | 0.55 | 1.15 | 0.61 | 79.19 | 4.40 | 97.74 | 0.39 |
| 1.56 | 0.0256 | 3 | 78.63 | 2.72 | 1.92 | 0.22 | 1.45 | 0.53 | 83.53 | 3.42 | 95.91 | 0.61 |
| 0.39 | 0.0064 | 3 | 74.87 | 1.88 | 3.15 | 0.04 | 2.98 | 0.71 | 82.23 | 1.91 | 92.45 | 0.70 |
| 0.10 | 0.0016 | 3 | 73.60 | 2.70 | 5.62 | 1.25 | 4.21 | 0.53 | 85.06 | 2.51 | 88.22 | 2.18 |
| 0.02 | 0.0004 | 3 | 67.33 | 0.46 | 7.30 | 1.64 | 5.84 | 0.61 | 80.15 | 1.21 | 83.67 | 1.18 |
| 0.00 | 0.0000 | 3 | 71.47 | 2.72 | 6.99 | 1.28 | 5.51 | 0.63 | 79.80 | 3.99 | 85.15 | 1.16 |

TABLE 89
Mean editing in PHH with increasing doses of BC22-2XUGI-Hibit mRNA.

| | | | | | | | | | Total | | C-to-T | |
|---|---|---|---|---|---|---|---|---|---|---|---|---|
| Dose | Dose | | C-to-T | | C-to-A/G | | Indels | | editing | | purity | |
| (ng) | (nM) | n | Mean | SD | Mean | SD | Mean | SD | Mean | SD | Mean | SD |
| 100.00 | 0.2575 | 3 | 81.90 | 2.37 | 1.47 | 0.87 | 1.34 | 0.20 | 84.29 | 1.23 | 96.67 | 0.85 |
| 33.00 | 0.0858 | 3 | 79.70 | 0.49 | 1.41 | 0.81 | 0.92 | 0.37 | 82.58 | 1.13 | 97.17 | 1.15 |
| 11.00 | 0.0286 | 3 | 65.93 | 0.75 | 1.70 | 0.30 | 1.47 | 0.19 | 68.52 | 0.96 | 95.41 | 0.20 |
| 3.70 | 0.0095 | 3 | 47.90 | 1.01 | 1.45 | 0.72 | 0.89 | 0.29 | 50.21 | 0.91 | 95.34 | 1.32 |
| 1.23 | 0.0032 | 3 | 27.77 | 2.64 | 1.45 | 0.74 | 0.86 | 0.60 | 29.52 | 2.34 | 92.39 | 3.92 |
| 0.41 | 0.0011 | 3 | 14.90 | 3.07 | 0.79 | 0.35 | 0.30 | 0.35 | 15.71 | 3.41 | 93.63 | 2.84 |
| 0.14 | 0.0004 | 3 | 7.30 | 0.74 | 0.19 | 0.15 | 0.02 | 0.02 | 7.51 | 0.86 | 97.33 | 1.89 |
| 0.00 | 0.0000 | 3 | 0.09 | 0.13 | 0.06 | 0.10 | 0.02 | 0.03 | 0.15 | 0.10 | NA | NA |

### Example 36.2 Evaluation of Intracellular Protein Levels

[0744] Twenty hours post transfection, protein levels were detected using the Nano-Glo® HiBiT Lytic Detection System (Promega cat #N3040) according to the manufacture's protocol. Promega #N3010, a commercially available control protein with a HiBiT tag (of known concentration and known molecular weight) was serially diluted (1:5) in PBS and spiked into wells containing PHH that had not been transfected as a reference control. One hundred μL of reconstituted HiBiT lytic reagent was added to the standard wells and all other experiment wells. Lysates were moved to white-walled plates, and relative luminescence units (RLU) were read out by the CLARIstar plus (BMG Labtech) plate reader with gain set at 3,600. Background signal was subtracted from all wells, and the number of protein copies per well for each sample was calculated using the linear regression equation derived by the HiBiT standard. HiBiT quantitation is presented in Table 90 and normalized to the expression level of the 3.7 ng BC22-2XUGI-HiBiT mRNA sample.

TABLE 90
Mean protein expression (arbitrary units) for Hibit-tagged proteins.

| Hibit mRNA | Dose (ng) | Dose (nM) | Mean | SD |
|---|---|---|---|---|
| BC22n-HiBIT | 100.00 | 0.2857 | 22.59 | 2.05 |
| | 33.00 | 0.0952 | 10.07 | 1.04 |
| | 11.00 | 0.0317 | 4.12 | 0.59 |
| | 3.70 | 0.0106 | 1.09 | 0.02 |
| UGI-HIBIT | 100.00 | 1.6400 | 4063.15 | 532.85 |
| | 25.00 | 0.4100 | 993.10 | 76.48 |
| | 6.25 | 0.1025 | 254.04 | 26.29 |
| | 1.56 | 0.0256 | 67.16 | 7.73 |
| | 0.39 | 0.0064 | 21.66 | 1.83 |
| BC22-2XUGI-HIBIT | 100.00 | 0.2575 | 25.82 | 2.08 |
| | 33.00 | 0.0858 | 9.13 | 1.15 |
| | 11.00 | 0.0286 | 2.87 | 0.72 |
| | 3.70 | 0.0095 | 1.00 | 0.27 |

[0745] The data in Table 90 were used to generate hyperbolic curves and interpolate the protein units expressed at the minimum dose required to achieve saturating editing or C-to-T purity levels. The minimum dose as saturating levels is defined here as twice the EC90 (2×EC90), the concentration required to achieve 90% total editing or C-to-T purity, respectively, for each mRNA tested. Table 91 shows the 2×EC90 doses (in ng and nM) of the mRNAs tested in this experiment and the BC22 and UGI peptide units and their ratios at these doses. For base editors and UGI-HiBiT, protein units are equal to peptide units. UGI peptide units for BC22-2XUGI were calculated by multiplying the BC22-2XUGI protein units by a factor of 2. For the samples edited with BC22n and UGI expressed as separate, unfused proteins, the ratio of BC22n peptide units at total editing 2×EC90 to the UGI peptide units at C to T purity 2×EC90 was approximately 1:10. For the samples edited with BC22-2XUGI, the ratio of base editor peptide units at total editing 2×EC90 to the UGI peptide units at C to T purity 2×EC90 was approximately 1:5.

TABLE 91
2X EC90 for mRNA and protein at relevant editing readouts.

| | | mRNA | mRNA | Peptide |
|---|---|---|---|---|
| mRNA | Editing Readout | (ng) | (nM) | units |
| BC22n-HiBIT | total editing | 53.97 | 0.16 | 14.94 |
| UGI-HIBIT | C-to-T purity | 3.85 | 0.06 | 156.38 |
| BC22-2XUGI-HIBIT | total editing | 49.89 | 0.13 | 13.39 |
| | (base editor) | | | |
| | C-to-T purity (UGI) | 139.23 | 0.36 | 70.14 |

### Example 37. Protein Expression of Base Editor and UGI in T Cells

[0746] Base editing was performed with mRNAs encoding proteins with fused HiBiT tags in isolated human T cells to determine the relative amounts of base editor and UGI protein enzymatic units appropriate for high efficiency editing with high C to T purity.

### Example 37.1. T Cell Preparation

[0747] Healthy human donor apheresis was obtained commercially (Hemacare), and cells were washed, re-suspended in CliniMACS® PBS/EDTA buffer (Miltenyi Biotec Cat. 130-070-525) and processed in a MultiMACS™ Cell 24 Separator Plus device (Miltenyi Biotec). T cells were isolated via positive selection using a Straight from Leukopak® CD4/CD8 MicroBead kit, human (Miltenyi Biotec Cat. 130-122-352). T cells were aliquoted and cryopreserved for future use in Cryostor® CS10 (StemCell Technologies Cat. 07930).

[0748] Upon thaw, T cells were plated at a density of 1.0×10\hat{ }6 cells/mL in T cell growth media (TCGM) composed of CTS OpTmizer T Cell Expansion SFM and T Cell Expansion Supplement (ThermoFisher Cat. A1048501), 5% human AB serum (GeminiBio, Cat. 100-512) 1× Penicillin-Streptomycin, 1× Glutamax, 10 mM HEPES, 200 U/mL recombinant human interleukin-2 (Peprotech, Cat. 200-02), 5 ng/ml recombinant human interleukin 7 (Peprotech, Cat. 200-07), and 5 ng/ml recombinant human interleukin 15 (Peprotech, Cat. 200-15). After 24 hours in this media. T cells were activated with T Cell TransAct™, human reagent (Miltenyi, Cat. 130-111-160) added at a 1:100 ratio by volume.

### Example 37.2. T Cell LNP Treatment and Expansion

[0749] Forty-eight hours post-activation, T cells were harvested, centrifuged at 500 g for 5 min, and resuspended at a concentration of 1×10\hat{ }6 T cells/mL in T cell plating media (TCPM): a serum-free version of TCGM containing 400 U/mL recombinant human interleukin-2 (Peprotech, Cat. 200-02), 10 ng/ml recombinant human interleukin 7 (Peprotech, Cat. 200-07), and 10 ng/ml recombinant human interleukin 15 (Peprotech, Cat. 200-15). Fifty thousand T cells in 50 ul TCPM were added per well to be treated in flat-bottom 96-well plates.

[0750] LNPs were generated as described in Example 1 at a molar ratio of 35/47.5/15/2.5 (Lipid A/cholesterol/DSPC/PEG2k-DMG). Prior to T cell treatment, two separate LNP mixes (referred below as mixes “A” and “B”) were prepared in T cell treatment media (TCTM): a version of TCGM containing 20 ug/mL rhApoE3 (Peprotech, Cat. 350-02) in the absence of interleukins 2, 5 or 7.

[0751] To determine the minimum levels of BC22n-HiBiT mRNA necessary for saturating total editing, mix “A” consisted of an LNP with BC22n-HiBiT mRNA (SEQ ID NO: 4) diluted to 6.68 μg/mL (3.83 nM), while mix “B” consisted of an LNP with UGI mRNA (SEQ ID NO: 34) diluted to 1.67 μg/mL (5.8 nM) and a multi-cargo LNP containing sgRNAs G023520 (TRAC), G023524 (TRBC1/2), G023521 (CIITA) and G023523 (HLA-A) at the ratio of 4.5/8.7/21.4/65.4 diluted to 6.68 μg/mL (225.19 nM). LNP mixes “A” and “B” were individually incubated at 37° C. for 15 minutes. Mix “A” was serially diluted 1:4 in TCTM, and mixed 1:1 by volume with mix “B”. The resulting solution was added to T cells in 96-well plates at a 1:1 ratio by volume (50 μL per well).

[0752] To determine the minimum levels of UGI-HiBiT mRNA necessary for saturating C to T purity, mix “A” consisted of an LNP with UGI-HiBiT mRNA (SEQ ID NO: 316) diluted to 6.68 μg/mL (21.84 nM), while mix “B” consisted of an LNP with BC22n mRNA (SEQ ID NO: 1) diluted to 3.34 μg/mL (1.94 nM) and a multi-cargo LNP containing sgRNAs G023520 (TRAC), G023524 (TRBC1/2), G023521 (CIITA) and G023523 (HLA-A) at the ratio of 4.5/8.7/21.4/65.4 diluted to 6.68 μg/mL (225.19 nM). LNP mixes “A” and “B” were individually incubated at 37° C. for 15 minutes. Mix “A” was serially diluted 1:4 in TCTM, and mixed 1:1 by volume with mix “B”. The resulting solution was added to T cells in 96-well plates at a 1:1 ratio by volume (50 μL per well).

[0753] To determine the minimum levels of BC22-2XUGI-HiBiT mRNA necessary for saturating total editing and C to T purity, mix “A” consisted of an LNP with BC22-2XUGI-HiBiT mRNA (SEQ ID NO: 314) diluted to 6.68 μg/mL (3.46 nM), while mix “B” consisted of a multi-cargo LNP containing sgRNAs G023520 (TRAC), G023524 (TRBC1/2), G023521 (CIITA) and G023523 (HLA-A) at the ratio of 4.5/8.7/21.4/65.4 diluted to 6.68 μg/mL (225.19 nM). LNP mixes “A” and “B” were incubated individually at 37° C. for 15 minutes. Mix “A” was serially diluted 1:4 in TCTM, and mixed 1:1 by volume with mix “B”. The resulting solution was added to T cells in 96-well plates at a 1:1 ratio by volume (50 μL per well).

[0754] Following the addition of LNPs, T cells were incubated at 37° C. for 24 hours, at which time half of the cells were harvested for cell viability and protein expression assays, and the remaining cells were centrifuged at 500 g for 5 min, resuspended in 200 μL of TCGM and returned to the incubator.

### Example 37.3. Evaluation of Editing Outcomes by Next Generation Sequencing (NGS)

[0755] On day 4 post-LNP treatment, T cells were centrifuged at 500 g for 5 min, subjected to lysis, PCR amplification of each targeted locus and subsequent NGS analysis, as described in Example 1. Editing results at the TRAC, TRBC1, TRBC2, and CIITA loci with different concentrations of HiBiT mRNAs are shown in Tables 92-95, respectively. FIG. 59A shows total editing at different BC22n-HiBiT mRNA concentrations. FIG. 59B shows C-to-T purity at different UGI-HiBiT mRNA concentrations. Total editing and C-to-T puity with different BC22-2XUGI-HiBiT mRNA concentrations are shown in FIG. 59C and FIG. 59D, respectively.

[0756] Tables 92-95 show editing data for 4 different genomic loci (TRAC, TRBC1, TRBC2 and CIITA).

TABLE 92
Mean editing at TRAC locus in T cells.

| | | | | | | | | | Total | | C-to-T | |
|---|---|---|---|---|---|---|---|---|---|---|---|---|
| | Dose | | C-to-T | | C-to-A/G | | Indels | | editing | | purity | |
| mRNA | (nM) | n | Mean | SD | Mean | SD | Mean | SD | Mean | SD | Mean | SD |
| BC22n- | 0.9584 | 3 | 97.29 | 0.35 | 0.84 | 0.29 | 0.60 | 0.36 | 98.72 | 0.16 | 98.55 | 0.22 |
| HIBIT | 0.2396 | 3 | 97.82 | 0.31 | 0.58 | 0.27 | 0.67 | 0.20 | 99.07 | 0.32 | 98.74 | 0.07 |
| | 0.0599 | 3 | 96.50 | 0.50 | 0.79 | 0.22 | 0.68 | 0.15 | 97.97 | 0.31 | 98.50 | 0.36 |
| | 0.0150 | 3 | 87.53 | 0.41 | 0.68 | 0.09 | 0.45 | 0.31 | 88.66 | 0.14 | 98.72 | 0.39 |
| | 0.0037 | 3 | 50.82 | 2.39 | 0.57 | 0.13 | 0.32 | 0.15 | 51.71 | 2.22 | 98.27 | 0.49 |
| | 0.0009 | 3 | 17.33 | 1.00 | 0.46 | 0.17 | 0.17 | 0.13 | 17.97 | 1.18 | 96.50 | 1.09 |
| | 0.0002 | 3 | 5.31 | 0.28 | 0.37 | 0.10 | 0.19 | 0.07 | 5.88 | 0.21 | 90.36 | 1.67 |
| | 0.0000 | 3 | 0.67 | 0.08 | 0.44 | 0.13 | 0.13 | 0.04 | 1.24 | 0.18 | NA | NA |
| UGI- | 5.4608 | 3 | 97.00 | 0.65 | 0.81 | 0.37 | 0.37 | 0.23 | 98.18 | 0.38 | 98.80 | 0.29 |
| HIBIT | 1.3652 | 1 | 97.22 | ND | 0.28 | ND | 1.39 | ND | 98.89 | ND | 98.31 | ND |
| | 0.3413 | 3 | 95.90 | 0.49 | 1.43 | 0.16 | 1.01 | 0.21 | 98.35 | 0.58 | 97.51 | 0.18 |
| | 0.0853 | 3 | 82.34 | 3.24 | 7.45 | 2.31 | 8.06 | 0.86 | 97.85 | 0.15 | 84.15 | 3.22 |
| | 0.0213 | 3 | 55.53 | 1.88 | 17.35 | 3.45 | 23.98 | 2.08 | 96.86 | 0.39 | 57.34 | 2.17 |
| | 0.0053 | 3 | 32.80 | 2.32 | 24.36 | 3.54 | 38.14 | 1.67 | 95.30 | 1.10 | 34.44 | 2.78 |
| | 0.0013 | 3 | 26.28 | 0.77 | 28.61 | 2.18 | 41.47 | 1.09 | 96.36 | 0.43 | 27.28 | 0.91 |
| | 0.0000 | 3 | 22.46 | 1.08 | 28.38 | 3.67 | 44.56 | 2.27 | 95.40 | 0.37 | 23.55 | 1.22 |
| BC22- | 0.8638 | 3 | 81.31 | 2.75 | 2.41 | 0.03 | 2.10 | 0.85 | 85.82 | 1.90 | 94.73 | 1.12 |
| 2XUGI- | 0.2159 | 3 | 67.03 | 1.79 | 5.49 | 1.44 | 5.52 | 0.11 | 78.03 | 1.36 | 85.90 | 1.92 |
| HIBIT | 0.0540 | 3 | 28.40 | 1.39 | 9.46 | 0.96 | 14.74 | 0.45 | 52.60 | 1.77 | 53.99 | 1.31 |
| | 0.0135 | 3 | 12.89 | 1.33 | 6.69 | 0.29 | 11.11 | 0.84 | 30.69 | 1.91 | 41.93 | 2.10 |
| | 0.0034 | 3 | 4.87 | 0.42 | 2.68 | 0.10 | 5.99 | 0.61 | 13.54 | 0.80 | 35.97 | 1.75 |
| | 0.0008 | 3 | 1.86 | 0.23 | 0.85 | 0.19 | 1.51 | 0.30 | 4.22 | 0.47 | 44.33 | 6.34 |
| | 0.0002 | 3 | 0.82 | 0.21 | 0.48 | 0.01 | 0.77 | 0.18 | 2.07 | 0.04 | 39.42 | 9.51 |
| | 0.0000 | 3 | 0.63 | 0.05 | 0.37 | 0.08 | 0.13 | 0.09 | 1.13 | 0.13 | NA | NA |

TABLE 93
Mean editing at TRBC1 locus in T cells.

| | | | | | | | | | Total | | C-to-T | |
|---|---|---|---|---|---|---|---|---|---|---|---|---|
| | Dose | | C-to-T | | C-to-A/G | | Indels | | editing | | purity | |
| mRNA | (nM) | n | Mean | SD | Mean | SD | Mean | SD | Mean | SD | Mean | SD |
| BC22n- | 0.9584 | 3 | 94.22 | 1.08 | 1.41 | 0.30 | 1.71 | 0.25 | 97.33 | 0.57 | 96.80 | 0.56 |
| HIBIT | 0.2396 | 3 | 93.82 | 0.51 | 1.35 | 0.28 | 1.25 | 0.12 | 96.41 | 0.22 | 97.31 | 0.31 |
| | 0.0599 | 3 | 94.12 | 0.66 | 1.24 | 0.15 | 1.43 | 0.38 | 96.80 | 0.53 | 97.24 | 0.24 |
| | 0.0150 | 3 | 88.80 | 1.47 | 1.30 | 0.28 | 0.86 | 0.19 | 90.96 | 1.38 | 97.62 | 0.14 |
| | 0.0037 | 3 | 61.60 | 1.71 | 1.13 | 0.21 | 0.75 | 0.32 | 63.48 | 2.11 | 97.05 | 0.55 |
| | 0.0009 | 3 | 24.05 | 2.20 | 1.08 | 0.09 | 0.34 | 0.20 | 25.47 | 2.36 | 94.43 | 0.19 |
| | 0.0002 | 3 | 8.54 | 0.72 | 1.11 | 0.08 | 0.30 | 0.05 | 9.95 | 0.71 | 85.79 | 1.62 |
| | 0.0000 | 3 | 2.52 | 0.08 | 1.09 | 0.09 | 0.30 | 0.05 | 3.92 | 0.07 | NA | NA |
| UGI- | 5.4608 | 3 | 93.60 | 1.03 | 1.45 | 0.08 | 1.38 | 0.26 | 96.44 | 0.90 | 97.06 | 0.26 |
| HIBIT | 1.3652 | 3 | 93.90 | 0.77 | 1.59 | 0.16 | 1.57 | 0.49 | 97.05 | 0.33 | 96.75 | 0.47 |
| | 0.3413 | 3 | 89.15 | 1.94 | 4.27 | 1.30 | 2.99 | 0.98 | 96.41 | 0.34 | 92.48 | 2.33 |
| | 0.0853 | 3 | 72.64 | 2.56 | 12.64 | 0.23 | 11.89 | 3.35 | 97.16 | 0.88 | 74.78 | 3.31 |
| | 0.0213 | 3 | 40.67 | 3.56 | 24.32 | 0.89 | 31.25 | 2.94 | 96.25 | 1.16 | 42.23 | 3.22 |
| | 0.0053 | 3 | 17.56 | 3.20 | 32.38 | 1.05 | 42.82 | 2.69 | 92.76 | 1.49 | 18.90 | 3.14 |
| | 0.0013 | 3 | 11.59 | 2.11 | 34.92 | 3.79 | 48.02 | 5.70 | 94.53 | 1.67 | 12.27 | 2.31 |
| | 0.0000 | 3 | 8.51 | 1.36 | 33.48 | 1.78 | 51.60 | 2.15 | 93.60 | 1.31 | 9.08 | 1.34 |
| BC22- | 0.8638 | 3 | 83.49 | 0.86 | 4.26 | 0.27 | 3.64 | 0.71 | 91.39 | 1.58 | 91.36 | 0.93 |
| 2XUGI- | 0.2159 | 3 | 68.57 | 2.32 | 10.23 | 1.51 | 7.39 | 1.54 | 86.19 | 1.60 | 79.54 | 1.23 |
| HIBIT | 0.0540 | 3 | 35.21 | 1.71 | 20.43 | 1.18 | 20.76 | 0.94 | 76.41 | 2.69 | 46.07 | 0.61 |
| | 0.0135 | 3 | 20.21 | 1.22 | 18.44 | 1.47 | 18.28 | 1.63 | 56.92 | 2.62 | 35.56 | 2.76 |
| | 0.0034 | 3 | 10.88 | 0.49 | 9.98 | 1.82 | 8.13 | 3.43 | 28.99 | 5.28 | 38.36 | 6.83 |
| | 0.0008 | 3 | 4.48 | 1.11 | 2.35 | 0.47 | 3.64 | 1.34 | 10.46 | 2.87 | 43.01 | 2.64 |
| | 0.0002 | 3 | 3.39 | 0.37 | 1.71 | 0.23 | 0.97 | 0.69 | 6.07 | 0.83 | 56.10 | 4.73 |
| | 0.0000 | 3 | 2.81 | 0.22 | 1.15 | 0.09 | 0.34 | 0.07 | 4.30 | 0.26 | NA | NA |

TABLE 94
Mean editing at TRBC2 locus in T cells

| | | | | | | | | | Total | | C-to-T | |
|---|---|---|---|---|---|---|---|---|---|---|---|---|
| | Dose | | C-to-T | | C-to-A/G | | Indels | | editing | | purity | |
| mRNA | (nM) | n | Mean | SD | Mean | SD | Mean | SD | Mean | SD | Mean | SD |
| BC22n- | 0.9584 | 3 | 94.58 | 0.49 | 1.89 | 0.43 | 1.90 | 0.15 | 98.37 | 0.20 | 96.14 | 0.31 |
| HIBIT | 0.2396 | 3 | 95.25 | 0.63 | 1.68 | 0.04 | 1.20 | 0.26 | 98.13 | 0.42 | 97.06 | 0.26 |
| | 0.0599 | 3 | 94.01 | 0.63 | 1.36 | 0.09 | 1.63 | 0.44 | 97.00 | 0.58 | 96.92 | 0.37 |
| | 0.0150 | 3 | 88.99 | 0.35 | 1.39 | 0.27 | 1.04 | 0.19 | 91.41 | 0.08 | 97.35 | 0.45 |
| | 0.0037 | 3 | 56.12 | 2.38 | 1.29 | 0.12 | 0.74 | 0.30 | 58.15 | 2.64 | 96.51 | 0.61 |
| | 0.0009 | 3 | 20.90 | 0.73 | 1.20 | 0.25 | 0.40 | 0.09 | 22.50 | 0.59 | 92.85 | 1.31 |
| | 0.0002 | 3 | 8.08 | 1.04 | 1.11 | 0.15 | 0.32 | 0.09 | 9.51 | 0.94 | 84.81 | 3.36 |
| | 0.0000 | 3 | 2.97 | 0.24 | 1.08 | 0.10 | 0.49 | 0.24 | 4.55 | 0.51 | NA | NA |
| UGI- | 5.4608 | 3 | 94.87 | 0.14 | 1.43 | 0.21 | 1.06 | 0.20 | 97.35 | 0.12 | 97.45 | 0.02 |
| HIBIT | 1.3652 | 1 | 94.76 | 0.11 | 1.67 | 0.13 | 1.51 | 0.09 | 97.94 | 0.14 | 96.76 | 0.20 |
| | 0.3413 | 3 | 91.81 | 0.45 | 3.34 | 0.40 | 3.16 | 0.47 | 98.31 | 0.20 | 93.39 | 0.27 |
| | 0.0853 | 3 | 73.09 | 0.73 | 12.14 | 0.96 | 12.56 | 0.15 | 97.79 | 0.41 | 74.74 | 0.95 |
| | 0.0213 | 3 | 39.77 | 0.07 | 23.73 | 1.69 | 32.65 | 1.19 | 96.15 | 1.22 | 41.37 | 0.53 |
| | 0.0053 | 3 | 19.66 | 0.29 | 29.74 | 0.81 | 46.54 | 0.63 | 95.93 | 0.45 | 20.49 | 0.20 |
| | 0.0013 | 3 | 11.79 | 1.55 | 31.00 | 1.01 | 52.42 | 3.12 | 95.21 | 0.94 | 12.40 | 1.73 |
| | 0.0000 | 3 | 9.04 | 1.42 | 32.73 | 1.37 | 53.94 | 1.88 | 95.71 | 1.35 | 9.45 | 1.57 |
| BC22- | 0.8638 | 3 | 85.85 | 2.78 | 4.34 | 0.88 | 3.57 | 0.69 | 93.76 | 1.23 | 91.55 | 1.76 |
| 2XUGI- | 0.2159 | 3 | 68.48 | 2.35 | 10.64 | 0.47 | 8.73 | 0.23 | 87.85 | 1.95 | 77.93 | 0.95 |
| HIBIT | 0.0540 | 3 | 34.87 | 2.26 | 19.85 | 1.23 | 22.41 | 1.15 | 77.12 | 0.42 | 45.21 | 2.75 |
| | 0.0135 | 3 | 17.86 | 0.57 | 16.46 | 0.44 | 18.42 | 1.68 | 52.74 | 2.57 | 33.89 | 0.95 |
| | 0.0034 | 3 | 9.52 | 1.12 | 8.01 | 0.14 | 8.16 | 0.27 | 25.69 | 1.10 | 37.01 | 2.90 |
| | 0.0008 | 3 | 5.17 | 0.59 | 3.15 | 0.38 | 3.19 | 0.19 | 11.50 | 0.65 | 44.83 | 3.28 |
| | 0.0002 | 3 | 3.06 | 0.16 | 1.38 | 0.14 | 1.26 | 0.35 | 5.71 | 0.54 | 53.91 | 3.87 |
| | 0.0000 | 3 | 2.79 | 0.05 | 1.11 | 0.22 | 0.35 | 0.12 | 4.25 | 0.28 | NA | NA |

TABLE 95
Mean editing at CIITA locus in T cells

| | | | | | | | | | Total | | C-to-T | |
|---|---|---|---|---|---|---|---|---|---|---|---|---|
| | Dose | | C-to-T | | C-to-A/G | | Indels | | editing | | purity | |
| mRNA | (nM) | n | Mean | SD | Mean | SD | Mean | SD | Mean | SD | Mean | SD |
| BC22n- | 0.9584 | 3 | 96.75 | 0.28 | 1.68 | 0.18 | 0.57 | 0.07 | 99.00 | 0.05 | 97.72 | 0.23 |
| HIBIT | 0.2396 | 3 | 96.80 | 0.15 | 1.51 | 0.25 | 0.53 | 0.11 | 98.83 | 0.24 | 97.94 | 0.14 |
| | 0.0599 | 3 | 96.31 | 0.64 | 1.39 | 0.17 | 0.42 | 0.17 | 98.12 | 0.43 | 98.15 | 0.31 |
| | 0.0150 | 3 | 89.04 | 1.09 | 1.19 | 0.07 | 0.41 | 0.07 | 90.63 | 0.99 | 98.24 | 0.16 |
| | 0.0037 | 3 | 56.77 | 1.94 | 1.24 | 0.18 | 0.18 | 0.02 | 58.18 | 1.79 | 97.56 | 0.38 |
| | 0.0009 | 3 | 22.38 | 0.53 | 1.29 | 0.07 | 0.12 | 0.07 | 23.78 | 0.60 | 94.09 | 0.13 |
| | 0.0002 | 3 | 7.16 | 0.27 | 1.19 | 0.14 | 0.16 | 0.05 | 8.52 | 0.35 | 84.06 | 1.27 |
| | 0.0000 | 3 | 0.88 | 0.06 | 1.16 | 0.27 | 0.05 | 0.02 | 2.09 | 0.22 | NA | NA |
| UGI- | 5.4608 | 3 | 96.10 | 0.31 | 1.49 | 0.20 | 0.45 | 0.29 | 98.04 | 0.13 | 98.02 | 0.37 |
| HIBIT | 1.3652 | 1 | 96.09 | 0.59 | 1.69 | 0.25 | 0.92 | 0.25 | 98.69 | 0.13 | 97.36 | 0.51 |
| | 0.3413 | 3 | 94.04 | 0.58 | 3.10 | 0.29 | 1.70 | 0.58 | 98.83 | 0.12 | 95.15 | 0.65 |
| | 0.0853 | 3 | 80.13 | 1.16 | 8.99 | 0.79 | 9.57 | 0.60 | 98.69 | 0.06 | 81.20 | 1.17 |
| | 0.0213 | 3 | 51.75 | 1.05 | 20.78 | 0.75 | 25.48 | 0.97 | 98.02 | 0.40 | 52.80 | 1.28 |
| | 0.0053 | 3 | 32.69 | 1.17 | 27.04 | 1.89 | 37.48 | 0.98 | 97.21 | 0.34 | 33.63 | 1.14 |
| | 0.0013 | 3 | 26.59 | 0.34 | 26.78 | 1.72 | 43.51 | 1.10 | 96.88 | 1.06 | 27.45 | 0.37 |
| | 0.0000 | 3 | 25.47 | 1.76 | 27.78 | 1.86 | 43.47 | 3.32 | 96.72 | 0.63 | 26.33 | 1.72 |
| BC22- | 0.8638 | 3 | 86.31 | 2.68 | 3.78 | 1.26 | 2.13 | 0.51 | 92.22 | 1.69 | 93.59 | 1.81 |
| 2XUGI- | 0.2159 | 3 | 67.79 | 6.14 | 9.39 | 1.85 | 9.25 | 3.55 | 86.43 | 1.80 | 78.37 | 5.68 |
| HIBIT | 0.0540 | 3 | 41.54 | 1.66 | 17.05 | 0.26 | 21.16 | 1.07 | 79.75 | 2.54 | 52.08 | 0.85 |
| | 0.0135 | 3 | 26.63 | 0.45 | 14.36 | 1.00 | 19.33 | 2.27 | 60.32 | 3.17 | 44.23 | 2.37 |
| | 0.0034 | 3 | 12.13 | 1.48 | 6.22 | 1.17 | 9.19 | 0.82 | 27.54 | 2.50 | 44.09 | 4.45 |
| | 0.0008 | 3 | 3.99 | 0.46 | 2.94 | 0.39 | 2.94 | 0.45 | 9.87 | 1.00 | 40.47 | 3.90 |
| | 0.0002 | 3 | 1.40 | 0.38 | 1.56 | 0.34 | 0.83 | 0.23 | 3.79 | 0.51 | 36.41 | 5.18 |
| | 0.0000 | 3 | 0.67 | 0.10 | 1.10 | 0.16 | 0.09 | 0.08 | 1.86 | 0.17 | NA | NA |

### Example 37.4. Evaluation of Intracellular Protein Levels

[0757] Twenty-four hours post-LNP treatments, all samples were mixed thoroughly and two aliquots of 25 JAL were transferred to white-walled 96-well plates containing 75 μL of TCGM. One plate was subjected to a CellTiter-Glo® 2.0 Cell Viability Assay (Promega Cat No. G9242) and the other plate was subjected to a Nano-Glo® HiBiT Lytic Detection Assay (Promega Cat No. N3040). Both assays were performed following the manufacturer's protocol. Standards curves were prepared using known numbers of donor-matched T cells or a commercially available protein with a HiBiT tag (Promega Cat No. N3010). HiBiT quantitation is presented in Table % normalized to the expression level of the 0.0037 nM BC22n-HiBiT mRNA sample.

TABLE 96
Mean protein expression (arbitrary units) for HiBiT-tagged proteins.

| | Dose | | | |
|---|---|---|---|---|
| mRNA | (nM) | n | Average | SD |
| BC22n-HiBiT | 0.9584 | 3 | 51.93 | 2.20 |
| | 0.2396 | 3 | 33.39 | 4.42 |
| | 0.0599 | 3 | 15.40 | 1.34 |
| | 0.0150 | 3 | 4.05 | 0.07 |
| | 0.0037 | 3 | 1.00 | 0.05 |
| UGI-HIBIT | 5.4608 | 3 | 1499.52 | 106.66 |
| | 1.3652 | 3 | 583.54 | 53.95 |
| | 0.3413 | 3 | 180.50 | 16.40 |
| | 0.0853 | 3 | 55.38 | 3.55 |
| | 0.0213 | 3 | 16.05 | 1.26 |
| | 0.0053 | 3 | 4.32 | 0.32 |
| BC22-2XUGI-HIBIT | 0.8638 | 3 | 80.23 | 4.45 |
| | 0.2159 | 3 | 43.95 | 10.80 |
| | 0.0540 | 3 | 14.74 | 1.31 |
| | 0.0135 | 3 | 4.17 | 0.66 |
| | 0.0034 | 3 | 1.32 | 0.15 |

[0758] Data from Table 96 was used to generate hyperbolic curves and interpolate the the protein units expressed at the minimum doses required to achieve saturating editing or C-to-T purity levels. The minimum dose as saturating levels is defined here as twice the EC90 (2×EC90), the concentration required to achieve 90% total editing or C-to-T purity, respectively, for each mRNA tested.

[0759] Table 97 shows the 2×EC90 doses of the mRNAs tested in this experiment and the BC22 and UGI peptide units and their ratios at these doses. For base editors and UGI-HiBiT, protein units are equal to peptide units. UGI peptide units for BC22-2XUGI were calculated by multiplying the BC22-2XUGI protein units by a factor of 2. Table 98 shows the ratio of base editor peptide units at total editing 2×EC90 to the UGI peptide units at C to T purity 2×EC90.

TABLE 97
2X EC90 for mRNA and protein at relevant editing readouts.

| | Editing | | | Peptide |
|---|---|---|---|---|
| HiBiT mRNA | Readout | Locus | nM | units |
| BC22n-HiBiT | Total Editing | TRAC | 0.038 | 10.07 |
| | | TRBC1 | 0.031 | 8.41 |
| | | TRBC2 | 0.033 | 8.86 |
| | | CIITA | 0.035 | 9.32 |
| | | Average | 0.034 | 9.16 |
| | | SD | 0.003 | 0.71 |
| UGI-HIBIT | C-to-T purity | TRAC | 0.354 | 177.22 |
| BC22-2XUGI-HiBIT | | TRBC1 | 0.560 | 271.33 |
| | | TRBC2 | 0.557 | 269.91 |
| | | CIITA | 0.461 | 227.02 |
| | | Average | 0.483 | 236.37 |
| | | SD | 0.098 | 44.48 |
| | Total Editing | TRAC | 1.979 | 95.56 |
| | C-to-T purity | TRBC1 | 0.480 | 65.60 |
| | | TRBC2 | 0.434 | 62.84 |
| | | CIITA | 0.334 | 55.54 |
| | | Average | 0.807 | 69.88 |
| | | SD | 0.784 | 17.63 |
| | | TRAC | 0.859 | 160.35 |
| | | TRBC1 | 1.024 | 168.00 |
| | | TRBC2 | 1.103 | 171.04 |
| | | CIITA | 1.660 | 185.66 |
| | | Average | 1.161 | 171.26 |
| | | SD | 0.348 | 10.60 |

TABLE 98
Base editor to UGI enzyme ratios.

| | | Base Editor-to-UGI |
|---|---|---|
| Constructs | Locus | enzyme ratio |
| BC22n-HiBIT / UGI- | TRAC | 1 to 18 |
| HIBIT | TRBC1 | 1 to 32 |
| | TRBC2 | 1 to 30 |
| | CIITA | 1 to 24 |
| | Average | 1 to 26 |
| | SD | 7 |
| BC22-2XUGI-HIBIT | TRAC | 1 to 1.7 |
| | TRBC1 | 1 to 2.6 |
| | TRBC2 | 1 to 2.7 |
| | CIITA | 1 to 3.3 |
| | Average | 1 to 2.5 |
| | SD | 0.6 |

### Example 38. In Vivo Editing with UGI in Trans

[0760] In vivo editing profiles of deaminase containing constructs were compared to Cas9 when UGI was delivered in trans (as a separate mRNA). The constructs used encoded a fusion protein including D10A Cas9 with a deaminase.

[0761] Twenty-four commercially available CD-1 female mice ranging from 6-10 weeks of age (n=3 per group) were used in this study. Animals were weighed pre-dose for dosing calculations. Each RNA species was formulated separately in an LNP. Formulations containing editor mRNA, UGI mRNA and G019427 sgRNA were mixed in a w/w ratio of RNA cargos. The formulation mixture for Group 2 contained only editor mRNA and sgRNA and these were mixed in a w/w ratio of 2:1 (editor mRNA:sgRNA). Groups 3-8 contained mRNA:sgRNA at a w/w ratio of 2:1, and UGI mRNA mixed in at w/w ratios of 1:3, 1:10, 1:30, 1:100, 1:300, and 1:3000 (editor mRNA+sgRNA:UGI mRNA). Apart from the negative control group, which was dosed with TSS buffer only, all groups resulted in editing at the ANACP5 locus targeted with G019427. Formulations were administered intravenously via tail vein injection according to the doses listed in Table 99. Animals were periodically observed for adverse effects for at least 24 hours post-dose. Six days after treatment, animals were euthanized by cardiac puncture under isoflurane anesthesia; liver tissue were collected for downstream analysis. Liver punches weighing between 5 and 15 mg were collected for isolation of genomic DNA. Genomic DNA samples were analyzed with NGS sequencing as described in Example 1. Editing data are shown in Table 100 and FIG. 60. FIG. 60 shows C to T purity.

TABLE 99
Dosage of RNA species for each experimental group

| | | | Editor | sgRNA | UGI |
|---|---|---|---|---|---|
| | | | mRNA | dose | mRNA |
| Group | Samples | LNP cargos | (mg/kg) | (mg/kg) | (mg/kg) |
| 1 | TSS | None | 0 | 0 | 0 |
| 2 | 0.0 MPK UGI | BC22n (SEQ ID NO: 2) | 0.2 | 0.1 | 0.0 |
| 3 | 0.1 MPK UGI | BC22n (SEQ ID NO: 2) | | | 0.1 |
| 4 | 0.03 MPK UGI | G019427 | | | 0.03 |
| 5 | 0.01 MPK UGI | UGI (SEQ ID NO: 26) | | | 0.01 |
| 6 | 0.003 MPK UGI | | | | 0.003 |
| 7 | 0.001 MPK UGI | | | | 0.001 |
| 8 | 0.0001 MPK UGI | | | | 0.0001 |

TABLE 100
Mean editing in mouse livers

| | C-to-T | | C-to-A/G | | Indel | | C to T Purity | |
|---|---|---|---|---|---|---|---|---|
| Group | Mean | SD | Mean | SD | Mean | SD | Mean | SD |
| 1 | 0.13 | 0.06 | 1.42 | 0.07 | 0.09 | 0.02 | 7.99 | 2.88 |
| 2 | 27.30 | 1.40 | 21.13 | 1.99 | 29.55 | 1.16 | 35.00 | 1.39 |
| 3 | 67.47 | 0.35 | 2.99 | 0.31 | 5.19 | 1.05 | 89.21 | 1.57 |
| 4 | 65.50 | 0.87 | 3.56 | 0.40 | 5.17 | 1.01 | 88.25 | 1.68 |
| 5 | 64.73 | 1.37 | 4.54 | 0.49 | 6.65 | 0.64 | 85.25 | 1.39 |
| 6 | 59.53 | 1.50 | 7.07 | 0.52 | 9.79 | 0.84 | 77.93 | 1.24 |
| 7 | 53.20 | 4.94 | 10.27 | 1.99 | 14.08 | 4.01 | 68.67 | 7.23 |
| 8 | 33.90 | 2.88 | 18.37 | 1.82 | 25.81 | 2.21 | 43.44 | 3.90 |

### Example 39. Cytotoxic Susceptibility of Engineered T Cells

[0762] Engineered T cells were assayed for cytotoxic susceptibility when targeted by natural killer (NK) cells.

[0763] NK cells (Stemcell Technologies) were thawed and resuspended at a cell concentration of 1×10\hat{ }6 cells/ml into T cell growth media (TCGM) composed of OpTmizer TCGM and further supplemented with 100 U/mL of recombinant human interleukin-2 (Peprotech, Cat. 200-02), 5 ng/mL IL-7 (Peprotech, Cat. 200-07), 5 ng/mL IL-15 (Peprotech, Cat. 200-15). Cells were incubated at 37° C. for 24 hours.

[0764] Twenty-four hours post thaw, the NK cells were labelled with 0.5 μM Cell Trace Violet (CTV) as follows: a vial of CTV (CellTrace™ Violet Cell Proliferation Kit, for flow cytometry, Cat. C34571) was reconstituted in DMSO from the kit to give a 5 mM stock concentration. Two μL of CTV stock was diluted with 18 μL Phosphate-Buffered Saline (PBS) (Corning, Cat. 21-040-CV) to obtain a concentration of 0.5 mM. NK cells were centrifuged at 500×g for 5 minutes, the media was aspirated, and cells were resuspended in PBS at a concentration of 1×10\hat{ }6 cells/mL such that the final concentration of CTV dye was 0.5 μM. The cells were mixed with CTV dye solution incubated at 37° C. for 20 minutes. Unbound dye was quenched by the addition of TCGM and incubated for 5 minutes. The cells were centrifuged at 500×g for 5 minutes. Cells are resuspended in TCGM supplemented with 100 U/mL of recombinant human interleukin-2 (Peprotech, Cat. 200-02), 5 ng/mL IL-7 (Peprotech, Cat. 200-07), 5 ng/mL IL-15 (Peprotech, Cat. 200-15) at a concentration of 2×10\hat{ }6 cells/mL. To test a range of effector:target (E:T) ratios, CTV-labelled NK cells were aliquoted in 100 μL of media in a 6-point, 2-fold serial dilution with the highest number of cells being 2×10\hat{ }5 cells. Media-only samples were included as negative controls.

[0765] T cells were engineered using BC22n and UGI mRNA as described in Example 14 using G023523 (SEQ ID NO: 501) targeting HLA-A as a test sample and with G023519 (SEQ ID NO: 498) targeting B2M was as a positive control for NK killing. Unedited T cells were assayed as a negative control for NK killing. Other controls for flow cytometry included CTV-labelled NK cells without T cells; a “unstained” sample combining unlabelled NK cells and T cells; and a 1:1 mix of unlabeled heat killed and non-heat killed NK cells and T cells stained with 7AAD. T cells were resuspended at a density of 2×10\hat{ }5 cells in TCGM composed of OpTmizer TCGM and further supplemented with 100 U/mL of recombinant human interleukin-2 (Peprotech, Cat. 200-02), 5 ng/mL IL-7 (Peprotech, Cat. 200-07), and 5 ng/mL IL-15 (Peprotech, Cat. 200-15). Twenty thousand T cells were added to each well of NK cells and media controls. Cells were incubated at 37° C. for 24 hours.

[0766] At 24 hours, half of the volume of the cells from the LD heat killed well were heat killed and transferred back to the same well in the assay plate. Cells were centrifuged and resuspended in 80 μL of a 1:200 v/v solution of 7-AAD (BD Biosciences, Cat. 559925) in FACS buffer (PBS+2% FBS (Gibco, Cat. A31605-02)+2 mM EDTA (Invitrogen, Cat. 15-575-020)). Data for specific lysis of T cells were acquired by flow cytometry using a Cytoflex LX instrument (Beckman Coulter) and analyzed using the FlowJo software package. Gates were first drawn on the CTV negative population to gate out the NK cells, followed by gating on singlets after which a gate was drawn on the 7-AAD negative population to gate for the live T cells. The percent lysis of T cells was calculated by subtracting the live cell percentage from 100. T cells edited using BC22n and HLA-A guide G023523 (SEQ ID NO: 501) were protected from NK cell mediated cytotoxicity as shown in Table 101 and FIG. 62.

TABLE 101
Mean percentage lysis of engineered T cells exposed
to HLA-B and C matched NK cells

| | Unedited | | | G023519 B2M | | | G023523 HLA-A | | |
|---|---|---|---|---|---|---|---|---|---|
| E:T | Mean | SD | n | Mean | SD | n | Mean | SD | n |
| 10 | 19.65 | 2.33 | 2 | 69.60 | 4.81 | 2 | 22.23 | 1.10 | 3 |
| 5 | 18.80 | 1.59 | 3 | 61.10 | 0.85 | 2 | 21.35 | 0.49 | 2 |
| 2.5 | 22.27 | 6.62 | 3 | 47.95 | 0.49 | 2 | 22.10 | 1.27 | 2 |
| 1.25 | 18.47 | 1.27 | 3 | 39.20 | 2.98 | 3 | 21.00 | 0.81 | 3 |
| 0.63 | 19.30 | 0.66 | 3 | 30.20 | NA | 1 | 19.75 | 0.35 | 2 |
| 0.31 | 20.70 | 5.02 | 3 | 40.60 | NA | 1 | 20.27 | 1.67 | 3 |
| 0 | 19.77 | 2.01 | 3 | 26.57 | 2.73 | 3 | 18.30 | 1.41 | 3 |

### Example 40—Editing Window for SpyCas9 and Nme2Cas9 Base Editors

[0767] The range of guide positions available for deamination by base editors designed with Nme2Cas9 nickase or SpyCas9 nickase and APOBEC3a was assayed by evaluating C to T conversion efficacy on a position by position basis across a panel of target sites with cytosine residues in the guide region.

### Example 40.1 T Cell Preparation

[0768] Healthy human donor apheresis was obtained commercially (Hemacare), and cells were washed and resuspended in in CliniMACS® PBS/EDTA buffer (Miltenyi Biotec Cat. 130-070-525) and processed in a MultiMACS™ Cell 24 Separator Plus device (Miltenyi Biotec). T cells were isolated via positive selection using a Straight from Leukopak® CD4/CD8 MicroBead kit, human (Miltenyi Biotec Cat. 130-122-352). T cells were aliquoted and cryopreserved for future use in Cryostor® CS10 (StemCell Technologies Cat. 07930).

[0769] Upon thaw, T cells were plated at a density of 1.0×10\hat{ }6 cells/mL in T cell growth media (TCGM) composed of CTS OpTmizer T Cell Expansion SFM and T Cell Expansion Supplement (ThermoFisher Cat. A1048501), 5% human AB serum (GeminiBio, Cat. 100-512) 1× Penicillin-Streptomycin, 1× Glutamax, 10 mM HEPES, 200 U/mL recombinant human interleukin-2 (Peprotech, Cat. 200-02), 5 ng/mL recombinant human interleukin 7 (Peprotech, Cat. 200-07), and 5 ng/ml recombinant human interleukin 15 (Peprotech, Cat. 200-15). T cells were rested in this media for 24 hours, at which time they were activated with T Cell TransAct™, human reagent (Miltenyi, Cat. 130-111-160) added at a ratio of 1:100 by volume. T cells were activated for 48 hours prior to electroporation.

### Example 40.2 T Cell Editing with RNA Electroporation

[0770] Solutions containing mRNA encoding Spy BC22n (SEQ ID NO: 1) or Nme2 BC22n (SEQ ID NO: 315) and UGI (SEQ ID NO: 34) were prepared in P3 buffer. Guide RNAs targeting either the SCAP, LINC01588, LSP1, SEC61B, VEGFA, FancF, AAVS1, or ARHGEF9 locus was removed from the storage and denatured for 2 minutes at 95° C. and incubated at room temperature for 5 minutes.

[0771] Forty-eight hours post activation, T cells were harvested, centrifuged, and resuspended at a concentration of 12.5×10^{\hat{ }6} T cells/mL in P3 electroporation buffer (Lonza). For each well to be electroporated, 1×10\hat{ }⁵ T cells were mixed with 200 ng of BC22n or Nme2 base editor mRNA, 200 ng of UGI mRNA and 4 μM of sgRNAs in a final volume of 20 μL of P3 electroporation buffer. This mix was transferred in duplicate to 96-well Nucleofector™ plates and electroporated using the manufacturer's pulse code. Electroporated T cells were immediately rested in 80 μL of CTS Optimizer T cell growth media without cytokines for 15 minutes before being transferred to new flat-bottom 96-well plates containing an additional 80 μL of CTS OpTmizer T cell growth media supplemented with 2× cytokines. The resulting plates were incubated at 37° C. for 4 days. On day 4 post-electroporation, 100 μL of cells was harvested for DNA extraction. DNA samples were subjected to PCR and subsequent NGS analysis with two separate primer sets (technical replicates), as described in Example 1.

### Example 40.3 Base Editor Editing Window Analysis

[0772] Position values were assigned to each DNA base within the protospacer region and its 5′ and 3′ adjacent nucleotides. or SpyCas9, Position 1-20 represent the 20 bases bound by a SpyCas9 guide wherein position 1 is the PAM distal base and position 20 is the PAM proximal base. For Nme2Cas9, positions 1-24 represent the 24 bases bound by a Nme2Cas9 guide wherein position 1 is the PAM distal base and position 24 is the PAM proximal base. The 5′ and 3′ ends outside of protospacer region were assigned to be negative and positive positions, respectively; relative to Position 1.

[0773] Define conversion frequency: A guide can be designed to target the reference strand (strand +) or reverse complementary strand (strand −) of a gene. For strand + guides, each wild-type cytosine position in the target region was recorded and conversion frequency (cytosine to thymine) at the position was calculated as ratio of sequencing reads with thymine at the position versus reads with either cytosine or thymine at the position; For strand-guide, each wild-type guanine position in target region was recorded and a conversion frequency (guanine to adenine) at the position is calculated as ratio of sequencing reads with adenine at the position versus reads with adenine and guanine at the position.

[0774] Classify guide activity: Four replicates were measured for each guide: two technical replicates for each of two biological replicates. Only positions in a replicate with >500 sequencing reads would be further analysed. For each guide, the mean conversion frequency of a position is the average of the replicates, and the highest mean conversion frequency of all positions for a guide is used to classify this guide's conversion activity: Low, medium, and high activity guides have a highest mean conversion frequency of <50%, 50% & <70%, >70%, respectively. High activity guides for BC22n (n=38) and Nme2 base editor (n=14) were chosen for further window analysis as shown in Table 102.

TABLE 102
High activity guide sequences included in editing window analysis

| | Editor | | Editor | | Editor |
|---|---|---|---|---|---|
| guide | species | guide | species | guide | species |
| G021514 | Nme2 | G009272 | Spy | G021549 | Spy |
| G021519 | Nme2 | G009295 | Spy | G021573 | Spy |
| G021524 | Nme2 | G009303 | Spy | G021574 | Spy |
| G021529 | Nme2 | G009330 | Spy | G021575 | Spy |
| G021550 | Nme2 | G009333 | Spy | G021576 | Spy |
| G021551 | Nme2 | G012243 | Spy | G021577 | Spy |
| G021552 | Nme2 | G013549 | Spy | G021578 | Spy |
| G021553 | Nme2 | G013578 | Spy | G021579 | Spy |
| G021554 | Nme2 | G021537 | Spy | G021582 | Spy |
| G021555 | Nme2 | G021538 | Spy | G021584 | Spy |
| G021556 | Nme2 | G021540 | Spy | G021585 | Spy |
| G021560 | Nme2 | G021541 | Spy | G021586 | Spy |
| G021562 | Nme2 | G021542 | Spy | G021587 | Spy |
| G021570 | Nme2 | G021543 | Spy | G021588 | Spy |
| G009252 | Spy | G021544 | Spy | G021589 | Spy |
| G009255 | Spy | G021545 | Spy | G021591 | Spy |
| G009260 | Spy | G021548 | Spy | G021593 | Spy |
| G009269 | Spy | | | | |

[0775] Define conversion rate for each position across all guides: If a guide has the position recorded, each of its replicates with >500 sequencing reads at the position is considered as a “case”. Total cases were summed for each position of all guides and served as a denominator for conversion rate calculation. In each case, if the conversion frequency is greater than 50%, it is considered as a high conversion “event”, and total events is the sum of high conversion events for each position across all guides and replicates. The “events” serve as numerator for conversion rate calculation. Conversion Rate of a position equals the percentage of high conversion events in all cases for each position.

[0776] Table 103 displays the position, cases, events, and conversion rate for the spyBC22n C-to-T editing window. FIG. 63 shows conversion rate by position BC22n. FIG. 64 shows conversion rate by position for Nme2 base editor. Positions 1-11 for spyBC22n and positions 4-20 for Nme2BC22 show conversion rates over 25%.

TABLE 103
Conversion rate for Spy base editor and Nme2 base editor constructs.

| | | | | Conversion | | | | | |
|---|---|---|---|---|---|---|---|---|---|
| Editor | Pos. | Events | Cases | Rate | Editor | Pos. | Events | Cases | Conversion Rate |
| Nme2 | −20 | 0 | 14 | 0.0% | Spy | −20 | 0 | 48 | 0.0% |
| Nme2 | −19 | 0 | 9 | 0.0% | Spy | −19 | 0 | 29 | 0.0% |
| Nme2 | −18 | 0 | 24 | 0.0% | Spy | −18 | 0 | 26 | 0.0% |
| Nme2 | −17 | 0 | 24 | 0.0% | Spy | −17 | 0 | 32 | 0.0% |
| Nme2 | −16 | 0 | 24 | 0.0% | Spy | −16 | 0 | 30 | 0.0% |
| Nme2 | −15 | 0 | 14 | 0.0% | Spy | −15 | 0 | 43 | 0.0% |
| Nme2 | −14 | 0 | 15 | 0.0% | Spy | −14 | 0 | 39 | 0.0% |
| Nme2 | −13 | 0 | 9 | 0.0% | Spy | −13 | 0 | 54 | 0.0% |
| Nme2 | −12 | 0 | 17 | 0.0% | Spy | −12 | 0 | 60 | 0.0% |
| Nme2 | −11 | 0 | 17 | 0.0% | Spy | −11 | 0 | 35 | 0.0% |
| Nme2 | −10 | 0 | 10 | 0.0% | Spy | −10 | 4 | 47 | 8.5% |
| Nme2 | −9 | 0 | 24 | 0.0% | Spy | −9 | 0 | 38 | 0.0% |
| Nme2 | −8 | 0 | 12 | 0.0% | Spy | −8 | 0 | 33 | 0.0% |
| Nme2 | −7 | 0 | 14 | 0.0% | Spy | −7 | 0 | 24 | 0.0% |
| Nme2 | −6 | 0 | 30 | 0.0% | Spy | −6 | 4 | 41 | 9.8% |
| Nme2 | −5 | 0 | 19 | 0.0% | Spy | −5 | 4 | 37 | 10.8% |
| Nme2 | −4 | 0 | 12 | 0.0% | Spy | −4 | 0 | 25 | 0.0% |
| Nme2 | −3 | 0 | 4 | 0.0% | Spy | −3 | 0 | 42 | 0.0% |
| Nme2 | −2 | 0 | 24 | 0.0% | Spy | −2 | 0 | 38 | 0.0% |
| Nme2 | −1 | 0 | 18 | 0.0% | Spy | −1 | 11 | 56 | 19.6% |
| Nme2 | 1 | 0 | 14 | 0.0% | Spy | 1 | 26 | 43 | 60.5% |
| Nme2 | 2 | 1 | 17 | 5.9% | Spy | 2 | 31 | 51 | 60.8% |
| Nme2 | 3 | 3 | 17 | 17.6% | Spy | 3 | 34 | 38 | 89.5% |
| Nme2 | 4 | 6 | 24 | 25.0% | Spy | 4 | 41 | 41 | 100.0% |
| Nme2 | 5 | 8 | 14 | 57.1% | Spy | 5 | 52 | 52 | 100.0% |
| Nme2 | 6 | 8 | 14 | 57.1% | Spy | 6 | 39 | 39 | 100.0% |
| Nme2 | 7 | 8 | 18 | 44.4% | Spy | 7 | 37 | 37 | 100.0% |
| Nme2 | 8 | 5 | 18 | 27.8% | Spy | 8 | 42 | 42 | 100.0% |
| Nme2 | 9 | 7 | 28 | 25.0% | Spy | 9 | 38 | 38 | 100.0% |
| Nme2 | 10 | 14 | 17 | 82.4% | Spy | 10 | 33 | 45 | 73.3% |
| Nme2 | 11 | 15 | 21 | 71.4% | Spy | 11 | 28 | 48 | 58.3% |
| Nme2 | 12 | 12 | 16 | 75.0% | Spy | 12 | 8 | 57 | 14.0% |
| Nme2 | 13 | 6 | 10 | 60.0% | Spy | 13 | 0 | 63 | 0.0% |
| Nme2 | 14 | 11 | 11 | 100.0% | Spy | 14 | 1 | 55 | 1.8% |
| Nme2 | 15 | 21 | 23 | 91.3% | Spy | 15 | 0 | 45 | 0.0% |
| Nme2 | 16 | 17 | 19 | 89.5% | Spy | 16 | 0 | 50 | 0.0% |
| Nme2 | 17 | 11 | 16 | 68.8% | Spy | 17 | 0 | 42 | 0.0% |
| Nme2 | 18 | 2 | 16 | 12.5% | Spy | 18 | 0 | 59 | 0.0% |
| Nme2 | 19 | 2 | 12 | 16.7% | Spy | 19 | 0 | 62 | 0.0% |
| Nme2 | 20 | 6 | 16 | 37.5% | Spy | 20 | 0 | 54 | 0.0% |
| Nme2 | 21 | 4 | 20 | 20.0% | Spy | 21 | n/a | 0 | n/a |
| Nme2 | 22 | 0 | 19 | 0.0% | Spy | 22 | n/a | 0 | n/a |
| Nme2 | 23 | 0 | 16 | 0.0% | Spy | 23 | 0 | 23 | 0.0% |
| Nme2 | 24 | 0 | 20 | 0.0% | Spy | 24 | 0 | 46 | 0.0% |
| Nme2 | 25 | n/a | 0 | n/a | Spy | 25 | 0 | 123 | 0.0% |
| Nme2 | 26 | n/a | 0 | n/a | Spy | 26 | 0 | 127 | 0.0% |
| Nme2 | 27 | 0 | 10 | 0.0% | Spy | 27 | 0 | 47 | 0.0% |
| Nme2 | 28 | 0 | 8 | 0.0% | Spy | 28 | 0 | 38 | 0.0% |
| Nme2 | 29 | 0 | 45 | 0.0% | Spy | 29 | 0 | 37 | 0.0% |
| Nme2 | 30 | 0 | 45 | 0.0% | Spy | 30 | 0 | 51 | 0.0% |
| Nme2 | 31 | 0 | 9 | 0.0% | Spy | 31 | 0 | 44 | 0.0% |
| Nme2 | 32 | 0 | 12 | 0.0% | Spy | 32 | 0 | 42 | 0.0% |
| Nme2 | 33 | 0 | 22 | 0.0% | Spy | 33 | 0 | 34 | 0.0% |
| Nme2 | 34 | 0 | 24 | 0.0% | Spy | 34 | 0 | 39 | 0.0% |
| Nme2 | 35 | 0 | 18 | 0.0% | Spy | 35 | 0 | 43 | 0.0% |
| Nme2 | 36 | 0 | 13 | 0.0% | Spy | 36 | 0 | 37 | 0.0% |
| Nme2 | 37 | 0 | 13 | 0.0% | Spy | 37 | 0 | 32 | 0.0% |
| Nme2 | 38 | 0 | 9 | 0.0% | Spy | 38 | 0 | 33 | 0.0% |
| Nme2 | 39 | 0 | 16 | 0.0% | Spy | 39 | 0 | 50 | 0.0% |
| Nme2 | 40 | 0 | 6 | 0.0% | Spy | 40 | 0 | 33 | 0.0% |

### Example 41—CIITA Guide RNA Screening in T Cells with BC22n

[0777] Different sgRNAs were screened for their potency in knocking out the CIITA gene in human T cells using C to T base editing. The percentage of T cells negative for MHC class II and/or CD74 protein expression was assayed following CIITA editing following electroporation with mRNA and different sgRNAs.

### Example 41.1 T Cell Preparation

[0778] Healthy human donor apheresis was obtained commercially (Hemacare), and cells were washed and resuspended in CliniMACS® PBS/EDTA buffer (Miltenyi Biotec Cat. 130-070-525) and processed in a MultiMACS™ Cell 24 Separator Plus device (Miltenyi Biotec). T cells were isolated via positive selection using a Straight from Leukopak® CD4/CD8 MicroBead kit, human (Miltenyi Biotec Cat. 130-122-352). T cells were aliquoted and cryopreserved for future use in Cryostor® CS10 (StemCell Technologies Cat. 07930).

[0779] Upon thaw, T cells were plated at a density of 1.0×10\hat{ }6 cells/mL in T cell growth media (TCGM) composed of CTS OpTimizer T Cell Expansion SFM and T Cell Expansion Supplement (ThermoFisher Cat. A1048501), 5% human AB serum (GeminiBio, Cat. 100-512) 1× Penicillin-Streptomycin, 1× Glutamax, 10 mM HEPES, 200 U/mL recombinant human interleukin-2 (Peprotech, Cat. 200-02), 5 ng/mL recombinant human interleukin 7 (Peprotech, Cat. 200-07), and 5 ng/mL recombinant human interleukin 15 (Peprotech, Cat. 200-15). T cells were rested in this media for 24 hours, at which time they were activated with T Cell TransAct™, human reagent (Miltenyi, Cat. 130-111-160) added at a 1:100 ratio by volume. T cells were activated for 48 hours prior to electroporation.

### Example 41.2 T Cell Editing with RNA Electroporation

[0780] Solutions containing mRNA encoding BC22n (SEQ ID NO: 1) and UGI (SEQ ID NO: 34) were prepared in P3 buffer. One hundred μM of CIITA-targeting sgRNAs were removed from their storage plates and denatured for 2 minutes at 95° C. and incubated at room temperature for 5 minutes. Forty-eight hours post activation, T cells were harvested, centrifuged, and resuspended at a concentration of 12.5×10\hat{ }6 T cells/mL in P3 electroporation buffer (Lonza). For electroporation, 1×10\hat{ }5 T cells were mixed with 20 ng/μL of BC22n mRNAs, 20 ng/μL of UGI mRNA, and 20 pmols of sgRNA as described in Table 1 in a final volume of 20 μL of P3 electroporation buffer. This mix was transferred in duplicate to a 96-well Nucleofector™ plate and electroporated using the manufacturer's pulse code. Electroporated T cells were immediately rested in 80 μL of CTS Optimizer T cell growth media without cytokines for 15 minutes before being transferred to new flat-bottom 96-well plates containing an additional 80 μL of CTS Optimizer T cell growth media supplemented with 2× cytokines. The resulting plates were incubated at 37° C. for 10 days. On day 4 post-electroporation, cells were split 1:2 in 2 U-bottom plates. One plate was collected for NGS sequencing, while the other plate was replenished with CTS Optimizer fresh media with 1× cytokines. This plate was used for flow cytometry on Day 7.

### Example 41.3 Flow Cytometry and NGS Sequencing

[0781] On day 7 post-editing, T cells were assayed by flow cytometry to determine the surface expression of CD74 and HLA-DR, DP, DQ. Briefly, T cells were incubated for 30 minutes at 4° C. with a mixture of antibodies diluted in cell staining buffer (BioLegend, Cat. No. 420201). Antibodies against CD3 (BioLegend, Cat. No. 317336), CD4 (BioLegend, Cat. No. 317434), CD8 (BioLegend, Cat. No. 301046), and Viakrome (Beckman Coulter, Cat. No. C36628) were diluted at 1:100, and antibodies against HLA II-DR (BioLegend, Cat. No. 327018), HLA II-DP (BD Biosciences Cat No. 750872), HLA II-DQ (BioLegend, Cat. No. 561504), and CD74 (BioLegend, Cat. No. 326808) were diluted at 1:50. Cells were subsequently washed, resuspended in 100 μL of cell staining buffer and processed on a Cytoflex flow cytometer (Beckman Coulter). Flow cytometry data was analyzed using the FlowJo software package. T cells were gated based on size, shape, viability, CD8, HLA II-DP, HLA II-DQ, HLA II-DR, and CD74 expression.

TABLE 104
Percentage of cells negative for surface protein following
genomic editing of CIITA with BC22n. (n = 2)

| Guide | % HLA | | % HLA | | % HLA | | | |
|---|---|---|---|---|---|---|---|---|
| | II-DP- | | II-DQ- | | II-DR- | | % CD74- | |
| ID | Mean | SD | Mean | SD | Mean | SD | Mean | SD |
| G000502 | 68.70 | 3.54 | 76.30 | 4.24 | 76.70 | 3.96 | 66.25 | 5.87 |
| G016788 | 62.95 | 1.91 | 73.40 | 3.11 | 73.50 | 4.38 | 61.35 | 4.60 |
| G016053 | 70.25 | 6.72 | 71.50 | 4.95 | 73.90 | 4.10 | 60.20 | 6.08 |
| G016103 | 63.05 | 6.29 | 73.95 | 1.20 | 75.30 | 0.71 | 63.25 | 1.63 |
| G016114 | 65.80 | 1.98 | 74.70 | 4.38 | 75.85 | 5.30 | 65.25 | 5.87 |
| G016117 | 63.70 | 0.57 | 74.60 | 3.25 | 76.00 | 3.11 | 63.45 | 5.30 |
| G016034 | 85.55 | 2.19 | 86.30 | 1.13 | 87.95 | 0.07 | 80.30 | 0.14 |
| G016035 | 85.35 | 3.75 | 83.55 | 1.06 | 84.05 | 0.35 | 75.25 | 1.20 |
| G016039 | 74.95 | 0.35 | 78.20 | 0.71 | 78.50 | 0.28 | 68.90 | 1.27 |
| G016040 | 61.90 | 0.85 | 76.30 | 2.26 | 77.80 | 1.56 | 64.10 | 2.55 |
| G016041 | 68.60 | 1.84 | 77.30 | 0.85 | 76.75 | 0.35 | 64.20 | 0.00 |
| G016043 | 79.95 | 1.48 | 82.55 | 0.35 | 82.50 | 0.71 | 73.80 | 0.00 |
| G016044 | 87.84 | 3.17 | 87.80 | 1.56 | 88.65 | 1.34 | 83.75 | 1.91 |
| G016045 | 82.25 | 2.90 | 88.70 | 0.99 | 88.35 | 0.78 | 83.40 | 0.99 |
| G016047 | 76.85 | 0.21 | 85.40 | 0.28 | 85.05 | 0.21 | 79.20 | 0.00 |
| G016050 | 59.05 | 1.91 | 86.80 | 0.71 | 83.40 | 0.57 | 79.00 | 0.99 |
| G016052 | 76.85 | 0.21 | 79.25 | 0.78 | 80.55 | 0.92 | 70.85 | 1.34 |
| G016054 | 70.30 | 1.70 | 79.85 | 1.20 | 79.30 | 0.42 | 70.35 | 0.35 |
| G016055 | 73.35 | 1.34 | 82.15 | 2.19 | 82.15 | 1.77 | 73.10 | 1.56 |
| G016056 | 75.80 | 1.41 | 86.05 | 1.20 | 86.35 | 1.34 | 79.05 | 1.91 |
| G016057 | 77.90 | 0.71 | 83.95 | 0.35 | 84.45 | 0.21 | 75.30 | 0.99 |
| G016058 | 83.65 | 2.19 | 87.25 | 1.06 | 88.20 | 0.99 | 81.20 | 1.41 |
| G016060 | 72.55 | 0.78 | 82.70 | 1.84 | 83.05 | 2.47 | 73.55 | 2.76 |
| G016061 | 73.15 | 6.29 | 83.10 | 0.57 | 82.55 | 0.21 | 74.50 | 0.42 |
| G016063 | 74.60 | 7.35 | 83.75 | 0.64 | 83.50 | 0.71 | 75.45 | 0.35 |
| G016064 | 97.98 | 0.17 | 97.80 | 0.18 | 96.83 | 0.13 | 98.58 | 0.04 |
| G016065 | 77.80 | 0.28 | 77.70 | 1.98 | 80.00 | 1.56 | 69.35 | 3.18 |
| G016068 | 97.73 | 0.26 | 98.07 | 0.81 | 97.59 | 0.66 | 98.55 | 0.66 |
| G016071 | 87.05 | 4.31 | 88.55 | 0.49 | 89.45 | 0.49 | 84.80 | 0.85 |
| G016074 | 96.88 | 0.19 | 96.34 | 0.04 | 95.85 | 0.57 | 96.56 | 0.23 |
| G016075 | 86.05 | 0.92 | 88.20 | 0.85 | 88.50 | 0.14 | 83.50 | 1.27 |
| G016076 | 96.69 | 0.64 | 96.67 | 0.01 | 96.38 | 0.02 | 96.34 | 0.18 |
| G016077 | 92.27 | 2.50 | 91.20 | 1.22 | 91.40 | 1.44 | 89.39 | 1.68 |
| G016078 | 71.20 | 0.28 | 79.55 | 1.48 | 80.65 | 1.48 | 70.40 | 0.85 |
| G016079 | 89.31 | 1.57 | 91.24 | 0.55 | 90.24 | 0.00 | 88.40 | 0.14 |
| G016081 | 74.35 | 0.07 | 83.05 | 1.06 | 83.00 | 0.42 | 73.20 | 1.41 |
| G016082 | 82.30 | 5.09 | 87.50 | 0.71 | 88.80 | 0.14 | 82.25 | 0.07 |
| G016083 | 74.95 | 4.88 | 82.90 | 0.57 | 83.95 | 0.21 | 74.65 | 1.06 |
| G016085 | 79.90 | 2.97 | 85.40 | 0.71 | 87.45 | 0.07 | 79.45 | 0.49 |
| G016086 | 97.71 | 0.33 | 98.06 | 0.44 | 96.63 | 0.08 | 98.89 | 0.18 |
| G016087 | 70.25 | 9.12 | 78.55 | 3.61 | 78.30 | 3.39 | 69.30 | 4.24 |
| G016088 | 82.25 | 5.16 | 87.40 | 0.57 | 88.30 | 0.42 | 81.75 | 1.06 |
| G016089 | 69.00 | 1.27 | 76.65 | 1.34 | 79.00 | 1.70 | 67.35 | 1.06 |
| G016091 | 95.35 | 0.95 | 96.81 | 0.24 | 96.64 | 0.25 | 97.15 | 0.28 |
| G016092 | 94.89 | 0.61 | 94.87 | 0.45 | 95.35 | 0.83 | 94.65 | 0.37 |
| G016093 | 91.33 | 0.31 | 92.35 | 0.26 | 93.94 | 0.23 | 90.51 | 0.37 |
| G016094 | 79.70 | 4.24 | 84.85 | 2.05 | 85.70 | 2.69 | 78.75 | 2.90 |
| G016095 | 83.00 | 2.12 | 90.55 | 0.23 | 90.54 | 0.24 | 85.25 | 0.49 |
| G016097 | 71.85 | 6.86 | 82.80 | 1.56 | 82.40 | 1.27 | 73.00 | 1.70 |
| G016098 | 74.40 | 5.66 | 82.35 | 3.32 | 83.50 | 2.69 | 74.55 | 4.45 |
| G016099 | 86.30 | 2.69 | 89.71 | 1.00 | 90.57 | 0.35 | 86.25 | 1.06 |
| G016100 | 76.65 | 1.34 | 83.90 | 2.69 | 86.25 | 2.19 | 77.25 | 3.04 |
| G016101 | 69.30 | 0.71 | 77.55 | 1.48 | 78.55 | 1.77 | 68.65 | 1.77 |
| G016102 | 71.00 | 1.84 | 80.70 | 0.99 | 80.60 | 1.56 | 70.10 | 0.99 |
| G016106 | 82.00 | 1.27 | 87.55 | 0.64 | 88.80 | 0.71 | 81.30 | 1.41 |
| G016108 | 88.24 | 3.73 | 91.49 | 0.02 | 91.42 | 0.66 | 87.00 | 0.85 |
| G016109 | 88.05 | 0.92 | 90.20 | 1.27 | 90.41 | 1.85 | 86.85 | 2.05 |
| G016110 | 88.50 | 3.25 | 91.12 | 0.99 | 90.14 | 1.05 | 87.35 | 1.20 |
| G016111 | 78.15 | 0.92 | 84.45 | 0.78 | 85.80 | 0.85 | 78.45 | 1.20 |
| G016112 | 72.20 | 3.82 | 79.85 | 2.33 | 81.70 | 2.26 | 73.05 | 2.47 |
| G016115 | 95.58 | 1.10 | 98.36 | 0.73 | 97.69 | 0.48 | 98.54 | 0.40 |
| G016116 | 88.95 | 0.35 | 91.15 | 2.47 | 92.29 | 1.79 | 88.08 | 2.94 |
| G016066 | 68.90 | 0.57 | 73.20 | 1.70 | 74.20 | 0.99 | 62.25 | 2.76 |
| G016113 | 93.60 | 1.15 | 93.02 | 0.98 | 93.75 | 0.66 | 92.13 | 1.20 |
| G016084 | 96.42 | 0.83 | 98.38 | 0.33 | 97.32 | 0.69 | 98.77 | 0.17 |
| G016104 | 84.95 | 1.77 | 89.69 | 1.53 | 91.20 | 0.97 | 86.00 | 1.41 |
| G016070 | 90.52 | 0.16 | 92.10 | 0.50 | 92.49 | 0.64 | 89.75 | 0.91 |
| G016090 | 96.41 | 1.27 | 98.06 | 0.08 | 97.43 | 0.15 | 98.66 | 0.10 |
| G016048 | 76.80 | 1.56 | 80.60 | 0.99 | 81.70 | 1.41 | 72.25 | 2.19 |
| G016051 | 65.85 | 20.44 | 83.15 | 1.63 | 84.45 | 1.34 | 75.20 | 2.40 |
| G016073 | 82.00 | 1.98 | 82.65 | 1.20 | 83.15 | 2.76 | 75.90 | 0.14 |
| G016037 | 80.55 | 1.91 | 78.05 | 0.35 | 80.15 | 0.07 | 70.20 | 0.57 |
| G016038 | 85.45 | 0.49 | 82.45 | 0.35 | 84.90 | 0.28 | 76.10 | 1.13 |
| G016046 | 90.10 | 0.05 | 90.75 | 0.47 | 91.09 | 0.86 | 87.45 | 0.78 |
| G016049 | 84.50 | 0.00 | 84.90 | 0.42 | 86.75 | 0.07 | 78.75 | 0.21 |
| G016036 | 85.05 | 1.06 | 83.15 | 1.48 | 85.00 | 0.99 | 76.45 | 2.47 |
| G016080 | 91.13 | 2.02 | 92.11 | 1.07 | 92.99 | 0.97 | 89.72 | 1.16 |
| G016096 | 75.00 | 4.38 | 82.90 | 3.82 | 83.45 | 3.61 | 75.65 | 4.31 |
| G016032 | 97.50 | 0.09 | 97.42 | 0.65 | 96.30 | 0.33 | 98.19 | 0.36 |
| G016033 | 91.32 | 0.88 | 87.75 | 0.49 | 88.20 | 0.28 | 84.10 | 0.14 |
| G016030 | 93.42 | 0.08 | 88.10 | 0.71 | 88.40 | 0.42 | 85.10 | 0.28 |
| G016067 | 96.69 | 0.25 | 95.82 | 0.69 | 95.14 | 0.64 | 96.30 | 0.48 |
| G016031 | 80.45 | 1.20 | 82.10 | 0.99 | 83.95 | 0.07 | 74.80 | 0.57 |
| G016062 | 74.80 | 11.17 | 86.60 | 0.28 | 86.75 | 0.35 | 80.15 | 0.35 |
| G016059 | 77.05 | 3.75 | 83.05 | 0.92 | 83.85 | 0.92 | 75.00 | 1.41 |
| G016105 | 66.55 | 5.87 | 74.90 | 3.68 | 76.50 | 3.68 | 65.25 | 3.75 |
| G016107 | 71.80 | 4.10 | 80.70 | 0.28 | 80.75 | 0.49 | 71.00 | 0.57 |
| G016042 | 95.06 | 0.02 | 95.90 | 0.30 | 94.17 | 0.35 | 94.89 | 1.02 |
| G016069 | 52.65 | 3.18 | 76.35 | 0.21 | 75.90 | 0.28 | 62.35 | 0.21 |
| G016072 | 46.45 | 4.45 | 73.50 | 0.57 | 71.35 | 0.92 | 56.55 | 0.64 |
| G018021 | 76.60 | 0.99 | 84.00 | 0.57 | 84.65 | 0.49 | 76.85 | 0.07 |
| G018022 | 60.00 | 3.39 | 72.20 | 1.13 | 73.25 | 1.34 | 60.35 | 2.62 |
| G018023 | 64.80 | 2.97 | 74.35 | 0.07 | 75.85 | 0.35 | 63.85 | 2.33 |
| G018024 | 64.10 | 1.70 | 74.80 | 1.84 | 74.90 | 1.98 | 63.75 | 4.03 |
| G018025 | 63.85 | 6.15 | 73.50 | 6.08 | 74.90 | 6.36 | 63.75 | 6.72 |
| G018026 | 72.15 | 4.17 | 81.35 | 0.92 | 82.55 | 1.48 | 73.00 | 0.71 |
| G018027 | 82.40 | 0.99 | 81.45 | 1.91 | 82.40 | 2.26 | 72.35 | 3.32 |
| G018028 | 78.25 | 0.49 | 78.40 | 0.00 | 80.05 | 0.49 | 67.90 | 2.40 |
| G018029 | 75.60 | 3.11 | 74.80 | 0.14 | 76.95 | 0.07 | 64.15 | 2.05 |
| G018030 | 76.70 | 1.56 | 76.35 | 3.46 | 77.80 | 3.54 | 66.65 | 5.44 |
| G018031 | 81.40 | 3.96 | 84.00 | 1.13 | 82.40 | 0.42 | 75.55 | 0.49 |
| G018032 | 77.00 | 2.97 | 79.70 | 0.14 | 79.30 | 0.42 | 70.35 | 0.92 |
| G018033 | 81.15 | 3.04 | 82.05 | 0.35 | 81.60 | 0.57 | 73.20 | 1.27 |
| G018034 | 96.87 | 0.43 | 93.49 | 0.88 | 92.67 | 0.99 | 92.96 | 1.63 |
| G018035 | 94.39 | 0.64 | 88.20 | 1.13 | 88.64 | 2.03 | 83.70 | 2.97 |
| G018036 | 73.80 | 0.28 | 76.45 | 2.19 | 77.55 | 2.90 | 65.30 | 3.82 |
| G018037 | 71.80 | 0.14 | 72.25 | 5.16 | 73.85 | 5.73 | 61.40 | 7.64 |
| G018038 | 70.25 | 7.85 | 74.95 | 1.06 | 75.65 | 2.05 | 63.65 | 2.62 |
| G018039 | 94.72 | 0.49 | 91.67 | 0.05 | 91.17 | 0.51 | 89.20 | 0.99 |
| G018040 | 77.30 | 1.13 | 81.70 | 0.42 | 81.60 | 0.57 | 72.35 | 0.64 |
| G018041 | 75.10 | 1.70 | 80.15 | 0.35 | 80.15 | 0.21 | 70.50 | 0.85 |
| G018042 | 89.35 | 0.49 | 86.60 | 0.14 | 87.90 | 0.14 | 80.50 | 0.00 |
| G018043 | 85.50 | 1.13 | 84.00 | 1.56 | 84.95 | 0.35 | 77.55 | 0.64 |
| G018044 | 88.20 | 0.99 | 89.01 | 1.57 | 89.25 | 0.78 | 83.95 | 2.19 |
| G018045 | 76.15 | 1.34 | 82.35 | 2.33 | 81.60 | 2.26 | 72.50 | 3.25 |
| G018046 | 87.20 | 0.42 | 88.65 | 0.21 | 89.00 | 0.57 | 82.80 | 1.27 |
| G018047 | 79.95 | 1.63 | 84.60 | 2.12 | 84.25 | 2.76 | 76.25 | 3.61 |
| G018048 | 88.50 | 2.12 | 88.00 | 1.13 | 89.50 | 0.42 | 81.60 | 0.14 |
| G018049 | 81.40 | 3.25 | 81.40 | 4.24 | 82.60 | 5.23 | 74.00 | 5.66 |
| G018050 | 77.75 | 0.49 | 78.60 | 0.85 | 80.85 | 0.07 | 70.25 | 0.35 |
| G018051 | 81.20 | 1.56 | 81.95 | 1.48 | 84.20 | 1.13 | 73.55 | 3.04 |
| G018052 | 76.30 | 1.56 | 81.70 | 1.27 | 81.10 | 1.56 | 70.90 | 2.69 |
| G018053 | 77.25 | 1.06 | 81.40 | 0.85 | 82.35 | 1.06 | 71.55 | 1.63 |
| G018054 | 90.23 | 0.14 | 89.00 | 0.99 | 89.25 | 0.64 | 84.50 | 0.28 |
| G018055 | 73.80 | 3.39 | 79.20 | 0.99 | 79.85 | 1.06 | 67.80 | 1.41 |
| G018056 | 73.40 | 2.97 | 83.15 | 0.35 | 83.15 | 0.78 | 73.15 | 0.78 |
| G018057 | 73.95 | 1.63 | 81.40 | 2.97 | 81.45 | 1.91 | 71.30 | 3.11 |
| G018058 | 73.40 | 3.25 | 80.90 | 0.99 | 81.05 | 0.07 | 69.15 | 0.35 |
| G018059 | 75.15 | 4.17 | 81.70 | 0.14 | 81.55 | 0.07 | 71.10 | 1.13 |
| G018060 | 75.90 | 2.69 | 81.30 | 0.28 | 81.55 | 0.78 | 72.05 | 1.91 |
| G018061 | 71.65 | 2.05 | 81.60 | 1.41 | 80.65 | 1.06 | 72.00 | 1.41 |
| G018062 | 70.75 | 2.33 | 75.05 | 0.64 | 76.30 | 1.56 | 64.65 | 2.33 |
| G018063 | 78.45 | 0.92 | 80.95 | 0.92 | 82.20 | 0.85 | 72.50 | 0.14 |
| G018064 | 76.15 | 0.78 | 82.50 | 0.00 | 82.90 | 0.28 | 73.90 | 0.28 |
| G018065 | 77.65 | 0.21 | 82.60 | 0.42 | 83.85 | 0.35 | 74.05 | 0.07 |
| G018066 | 72.60 | 0.00 | 82.30 | 0.28 | 83.05 | 0.64 | 73.60 | 0.14 |
| G018067 | 97.57 | 0.81 | 98.24 | 0.19 | 97.73 | 0.28 | 98.83 | 0.04 |
| G018068 | 89.05 | 0.64 | 90.79 | 0.52 | 90.81 | 1.02 | 87.20 | 1.27 |
| G018069 | 75.90 | 2.55 | 81.55 | 0.92 | 82.15 | 0.35 | 71.85 | 1.20 |
| G018070 | 75.30 | 1.27 | 82.05 | 1.20 | 82.15 | 0.64 | 71.20 | 0.42 |
| G018071 | 77.40 | 3.39 | 83.35 | 1.77 | 84.75 | 1.91 | 74.65 | 0.92 |
| G018072 | 72.05 | 1.63 | 81.45 | 0.78 | 81.95 | 1.91 | 71.95 | 2.62 |
| G018073 | 72.35 | 0.07 | 79.30 | 1.13 | 79.25 | 2.19 | 69.40 | 2.26 |
| G018074 | 67.25 | 2.05 | 75.25 | 0.49 | 76.40 | 0.57 | 64.35 | 0.35 |
| G018075 | 96.86 | 1.46 | 97.33 | 0.14 | 96.08 | 0.31 | 98.35 | 0.04 |
| G018076 | 94.26 | 4.87 | 97.96 | 0.21 | 97.57 | 0.15 | 98.55 | 0.06 |
| G018077 | 74.75 | 2.76 | 81.65 | 0.35 | 82.25 | 0.21 | 72.25 | 1.34 |
| G018078 | 94.30 | 0.48 | 94.87 | 0.31 | 95.03 | 0.06 | 93.43 | 0.24 |
| G018079 | 86.00 | 1.56 | 89.55 | 0.35 | 89.80 | 0.28 | 84.25 | 0.78 |
| G018080 | 80.50 | 3.96 | 85.50 | 1.70 | 85.45 | 1.63 | 78.35 | 0.78 |
| G018081 | 79.85 | 1.06 | 86.05 | 1.20 | 86.00 | 0.85 | 78.70 | 0.57 |
| G018082 | 80.10 | 0.14 | 83.10 | 0.42 | 84.05 | 1.20 | 75.65 | 1.91 |
| G018083 | 86.75 | 1.34 | 89.50 | 0.28 | 89.35 | 0.21 | 84.55 | 0.21 |
| G018084 | 84.60 | 3.25 | 87.35 | 1.34 | 87.95 | 0.92 | 82.00 | 1.27 |
| G018085 | 86.95 | 2.76 | 90.35 | 2.05 | 90.03 | 1.03 | 86.30 | 2.26 |
| G018086 | 68.15 | 1.34 | 78.60 | 0.42 | 75.95 | 0.07 | 66.25 | 0.92 |
| G018087 | 61.40 | 2.26 | 74.35 | 2.33 | 72.65 | 2.62 | 61.85 | 1.63 |
| G018088 | 88.80 | 0.85 | 91.11 | 0.28 | 91.88 | 0.11 | 87.60 | 1.41 |
| G018089 | 81.75 | 4.17 | 89.00 | 1.83 | 89.28 | 1.53 | 83.75 | 1.77 |
| G018090 | 81.65 | 1.20 | 90.11 | 0.29 | 89.98 | 0.25 | 85.35 | 1.34 |
| G018091 | 97.02 | 0.49 | 98.63 | 0.03 | 98.15 | 0.12 | 98.98 | 0.08 |
| G018092 | 71.40 | 5.23 | 81.90 | 0.71 | 82.40 | 0.85 | 73.45 | 0.92 |
| G018093 | 94.15 | 1.20 | 96.36 | 0.21 | 96.36 | 0.02 | 95.70 | 0.18 |
| G018094 | 77.50 | 2.12 | 84.55 | 1.63 | 85.25 | 1.48 | 76.50 | 0.14 |
| G018095 | 69.50 | 0.00 | 83.05 | 0.07 | 82.70 | 0.14 | 73.90 | 0.99 |
| G018096 | 69.25 | 0.21 | 83.50 | 0.99 | 83.45 | 1.06 | 75.25 | 2.05 |
| G018097 | 68.55 | 4.74 | 81.60 | 2.83 | 82.20 | 1.84 | 73.25 | 3.75 |
| G018098 | 66.65 | 0.21 | 78.85 | 0.21 | 79.75 | 0.21 | 68.75 | 1.20 |
| G018099 | 65.05 | 3.18 | 73.70 | 4.95 | 74.55 | 4.31 | 62.40 | 4.53 |
| G018100 | 95.51 | 0.40 | 95.99 | 0.19 | 95.62 | 0.92 | 96.21 | 0.18 |
| G018101 | 93.00 | 0.33 | 93.70 | 0.01 | 94.03 | 0.25 | 93.11 | 0.28 |
| G018102 | 96.55 | 0.33 | 96.31 | 0.64 | 96.34 | 0.08 | 96.58 | 0.08 |
| G018103 | 96.92 | 1.46 | 97.58 | 0.02 | 97.53 | 0.08 | 98.36 | 0.40 |
| G018104 | 72.00 | 0.99 | 82.45 | 2.19 | 82.70 | 1.84 | 73.40 | 2.12 |
| G018105 | 71.60 | 1.98 | 82.20 | 0.71 | 81.80 | 0.28 | 73.30 | 0.00 |
| G018106 | 92.49 | 1.33 | 98.62 | 0.06 | 97.03 | 0.43 | 98.96 | 0.04 |
| G018107 | 96.55 | 1.25 | 98.14 | 0.56 | 97.53 | 0.70 | 98.98 | 0.08 |
| G018108 | 85.50 | 0.42 | 88.00 | 0.71 | 89.35 | 0.92 | 83.40 | 1.56 |
| G018109 | 84.10 | 1.56 | 84.55 | 2.19 | 86.90 | 1.27 | 79.75 | 3.32 |
| G018110 | 67.65 | 3.04 | 75.15 | 0.49 | 77.50 | 0.99 | 65.35 | 1.48 |
| G018111 | 96.49 | 0.35 | 96.85 | 1.05 | 95.24 | 1.32 | 97.03 | 0.52 |
| G018112 | 68.60 | 5.09 | 76.65 | 4.88 | 77.30 | 4.53 | 66.60 | 4.38 |
| G018113 | 72.75 | 3.89 | 79.60 | 3.54 | 80.15 | 2.76 | 70.30 | 3.96 |
| G018114 | 70.80 | 2.26 | 80.05 | 2.47 | 81.25 | 1.77 | 71.65 | 2.62 |
| G018115 | 62.40 | 1.41 | 77.40 | 0.57 | 76.90 | 1.27 | 67.00 | 1.56 |
| G018116 | 96.05 | 0.89 | 98.01 | 0.39 | 96.99 | 0.42 | 98.32 | 0.21 |
| G018117 | 96.93 | 1.27 | 97.63 | 0.52 | 97.19 | 0.87 | 98.96 | 0.25 |
| G018118 | 97.25 | 0.51 | 97.71 | 0.25 | 96.94 | 0.44 | 98.91 | 0.26 |
| G018119 | 94.78 | 1.02 | 96.29 | 1.11 | 95.57 | 1.05 | 97.00 | 1.20 |
| G018120 | 96.04 | 1.87 | 97.61 | 0.06 | 97.42 | 0.56 | 98.94 | 0.07 |
| G018121 | 95.26 | 0.62 | 97.12 | 0.41 | 96.44 | 0.23 | 97.85 | 0.45 |

[0782] On day 4 post-editing, DNA samples were subjected to PCR and subsequent NGS analysis, as described in Example 1. Table 105 shows CIITA editing outcomes in T cells edited with BC22n.

TABLE 105
Mean percent editing at CIITA locus with BC22n. (n = 2)

| Guide | % C to T | | % C to A/G | | % Indels | |
|---|---|---|---|---|---|---|
| ID | Mean | SD | Mean | SD | Mean | SD |
| G000502 | 84.63 | 2.39 | 0.82 | 0.19 | 1.26 | 0.37 |
| G016788 | 95.63 | 0.06 | 0.99 | 0.39 | 0.72 | 0.15 |
| G016053 | 94.77 | 1.07 | 1.66 | 0.43 | 0.71 | 0.02 |
| G016103 | 95.60 | 0.97 | 0.63 | 0.23 | 0.75 | 0.29 |
| G016114 | 96.42 | 0.23 | 0.66 | 0.59 | 0.65 | 0.09 |
| G016117 | 96.23 | 0.70 | 0.82 | 0.28 | 0.90 | 0.17 |
| G016034 | 93.11 | 1.07 | 0.61 | 0.21 | 1.49 | 0.52 |
| G016035 | 95.41 | 0.59 | 0.52 | 0.31 | 0.62 | 0.24 |
| G016039 | 88.20 | 1.33 | 1.51 | 0.42 | 7.99 | 1.32 |
| G016043 | 88.51 | 2.91 | 1.27 | 0.11 | 2.23 | 0.46 |
| G016044 | 0.13 | 0.03 | 90.04 | 0.38 | 9.83 | 0.41 |
| G016045 | 61.66 | 0.51 | 1.73 | 0.90 | 7.12 | 0.22 |
| G016047 | 92.74 | 0.48 | 0.80 | 0.06 | 3.00 | 0.13 |
| G016050 | 90.63 | 0.04 | 1.35 | 0.38 | 1.87 | 0.56 |
| G016052 | 92.68 | 1.74 | 0.83 | 0.44 | 3.26 | 1.66 |
| G016054 | 90.82 | 2.94 | 1.03 | 0.89 | 4.38 | 4.28 |
| G016055 | 83.61 | 1.98 | 0.46 | 0.21 | 10.63 | 1.04 |
| G016056 | 96.69 | 0.65 | 0.30 | 0.03 | 0.64 | 0.35 |
| G016057 | 93.83 | 0.35 | 0.98 | 0.18 | 0.99 | 0.47 |
| G016058 | 95.49 | 0.06 | 0.35 | 0.14 | 0.41 | 0.31 |
| G016060 | 85.95 | 0.54 | 0.49 | 0.16 | 7.63 | 1.63 |
| G016061 | 92.81 | 2.51 | 0.59 | 0.34 | 0.75 | 0.19 |
| G016063 | 70.60 | 1.87 | 0.31 | 0.15 | 0.25 | 0.07 |
| G016064 | 94.14 | 2.28 | 0.81 | 0.41 | 0.97 | 0.33 |
| G016065 | 57.50 | 1.68 | 0.61 | 0.37 | 1.15 | 0.32 |
| G016068 | 94.26 | 0.97 | 0.34 | 0.16 | 0.52 | 0.21 |
| G016071 | 93.78 | 0.73 | 0.84 | 0.14 | 2.17 | 0.40 |
| G016074 | 93.88 | 1.20 | 0.92 | 0.19 | 2.41 | 0.28 |
| G016075 | 91.72 | 0.73 | 0.58 | 0.15 | 2.89 | 0.52 |
| G016076 | 91.24 | 1.10 | 0.28 | 0.20 | 3.02 | 1.02 |
| G016077 | 94.94 | 1.07 | 1.08 | 0.53 | 1.50 | 0.46 |
| G016078 | 93.52 | 1.78 | 0.41 | 0.15 | 3.30 | 1.54 |
| G016079 | 96.29 | 0.05 | 0.51 | 0.08 | 0.81 | 0.13 |
| G016081 | 75.32 | 7.28 | 1.33 | 1.44 | 7.61 | 7.04 |
| G016082 | 31.35 | 5.20 | 0.07 | 0.14 | 34.39 | 6.24 |
| G016083 | 0.24 | 0.08 | 99.63 | 0.11 | 0.08 | 0.06 |
| G016085 | 80.16 | 3.07 | 0.74 | 0.37 | 0.36 | 0.12 |
| G016086 | 96.02 | 1.68 | 1.45 | 0.46 | 0.84 | 0.38 |
| G016087 | 90.30 | 1.43 | 0.32 | 0.20 | 5.11 | 0.54 |
| G016088 | 92.14 | 0.51 | 1.05 | 0.33 | 2.24 | 0.86 |
| G016089 | 94.49 | 0.39 | 0.61 | 0.30 | 1.14 | 0.30 |
| G016091 | 95.93 | 0.99 | 1.03 | 0.23 | 0.37 | 0.09 |
| G016092 | 95.62 | 0.79 | 1.17 | 0.40 | 0.71 | 0.28 |
| G016093 | 95.74 | 0.81 | 0.94 | 0.43 | 0.43 | 0.18 |
| G016094 | 95.85 | 1.03 | 0.58 | 0.39 | 0.99 | 0.48 |
| G016095 | 94.77 | 0.52 | 1.32 | 0.31 | 0.72 | 0.37 |
| G016097 | 94.90 | 1.64 | 0.55 | 0.19 | 1.40 | 0.51 |
| G016098 | 91.71 | 1.11 | 0.48 | 0.18 | 0.50 | 0.36 |
| G016099 | 93.42 | 1.55 | 0.56 | 0.05 | 3.64 | 1.06 |
| G016100 | 96.54 | 0.93 | 0.46 | 0.22 | 0.46 | 0.36 |
| G016101 | 41.21 | 1.15 | 0.77 | 0.07 | 0.22 | 0.04 |
| G016102 | 96.06 | 1.23 | 0.46 | 0.05 | 0.69 | 0.25 |
| G016106 | 90.41 | 1.16 | 3.33 | 0.54 | 2.66 | 0.49 |
| G016108 | 76.19 | 0.74 | 0.42 | 0.28 | 0.69 | 0.38 |
| G016109 | 94.93 | 0.35 | 0.46 | 0.21 | 1.86 | 0.59 |
| G016110 | 87.64 | 1.01 | 0.55 | 0.20 | 7.63 | 0.72 |
| G016111 | 92.93 | 1.09 | 1.17 | 0.58 | 2.11 | 1.08 |
| G016112 | 1.56 | 0.46 | 1.79 | 0.90 | 0.03 | 0.05 |
| G016115 | 89.86 | 1.01 | 0.67 | 0.29 | 7.30 | 0.50 |
| G016116 | 91.37 | 0.33 | 0.54 | 0.27 | 0.59 | 0.09 |
| G016066 | 1.02 | 0.16 | 0.32 | 0.07 | 0.40 | 0.21 |
| G016113 | 93.23 | 0.98 | 1.10 | 0.16 | 2.40 | 0.57 |
| G016084 | 74.10 | 1.35 | 0.87 | 0.16 | 21.41 | 0.94 |
| G016104 | 0.00 | 0.00 | 0.00 | 0.00 | 0.00 | 0.00 |
| G016070 | 94.80 | 0.30 | 0.54 | 0.04 | 1.66 | 0.17 |
| G016090 | 84.09 | 0.00 | 0.51 | 0.00 | 12.29 | 0.00 |
| G016048 | 48.81 | 1.82 | 0.78 | 0.07 | 0.54 | 0.18 |
| G016051 | 95.69 | 0.45 | 1.06 | 0.09 | 0.91 | 0.25 |
| G016073 | 94.11 | 0.83 | 0.76 | 0.18 | 1.37 | 0.29 |
| G016037 | 64.35 | 3.31 | 1.61 | 0.81 | 3.46 | 4.94 |
| G016038 | 94.99 | 2.01 | 1.80 | 0.64 | 1.25 | 0.88 |
| G016046 | 82.29 | 2.89 | 0.88 | 0.54 | 14.28 | 2.86 |
| G016049 | 95.33 | 0.15 | 1.41 | 0.87 | 0.46 | 0.66 |
| G016036 | 71.71 | 3.82 | 0.63 | 0.14 | 1.94 | 0.40 |
| G016080 | 81.09 | 1.58 | 1.33 | 0.47 | 5.64 | 0.94 |
| G016096 | 94.79 | 0.33 | 0.45 | 0.10 | 1.81 | 0.37 |
| G016032 | 90.27 | 1.53 | 2.25 | 2.37 | 2.97 | 0.38 |
| G016033 | 83.90 | 0.89 | 1.79 | 1.63 | 5.03 | 0.94 |
| G016030 | 96.66 | 1.35 | 0.65 | 0.39 | 0.31 | 0.14 |
| G016067 | 95.79 | 0.26 | 0.61 | 0.17 | 1.37 | 0.26 |
| G016031 | 94.51 | 0.24 | 0.75 | 0.07 | 2.35 | 0.68 |
| G016062 | 93.37 | 0.45 | 1.17 | 0.13 | 1.91 | 0.33 |
| G016059 | 90.26 | 0.93 | 0.80 | 0.30 | 5.62 | 0.33 |
| G016105 | 95.81 | 1.17 | 0.53 | 0.24 | 0.47 | 0.45 |
| G016107 | 91.94 | 2.74 | 0.66 | 0.36 | 3.18 | 2.72 |
| G016042 | 90.07 | 0.00 | 0.97 | 0.00 | 2.51 | 0.00 |
| G016069 | 93.31 | 0.96 | 0.96 | 0.31 | 1.03 | 0.33 |
| G016072 | 84.94 | 7.39 | 0.39 | 0.08 | 11.91 | 8.00 |
| G018021 | 91.14 | 2.38 | 2.45 | 0.52 | 3.22 | 2.60 |
| G018022 | 93.68 | 3.27 | 1.83 | 0.33 | 1.46 | 0.10 |
| G018023 | 92.37 | 1.73 | 2.25 | 0.07 | 2.31 | 0.52 |
| G018024 | 96.06 | 1.54 | 0.41 | 0.37 | 0.97 | 0.07 |
| G018025 | 96.88 | 0.78 | 0.63 | 0.12 | 0.43 | 0.06 |
| G018026 | 89.15 | 1.37 | 1.66 | 0.04 | 7.20 | 1.31 |
| G018027 | 88.89 | 3.13 | 1.02 | 0.04 | 5.37 | 2.62 |
| G018028 | 91.28 | 2.09 | 0.59 | 0.24 | 2.96 | 2.02 |
| G018029 | 22.86 | 0.72 | 0.43 | 0.07 | 0.17 | 0.02 |
| G018030 | 79.89 | 2.66 | 0.36 | 0.51 | 0.18 | 0.25 |
| G018031 | 90.43 | 1.35 | 0.47 | 0.38 | 1.52 | 0.07 |
| G018032 | 64.78 | 2.64 | 1.39 | 0.69 | 1.06 | 0.50 |
| G018033 | 88.94 | 0.84 | 1.98 | 0.29 | 1.97 | 0.44 |
| G018034 | 89.00 | 1.56 | 1.09 | 0.11 | 6.23 | 0.88 |
| G018035 | 95.10 | 1.59 | 0.50 | 0.25 | 0.66 | 0.17 |
| G018036 | 83.69 | 0.01 | 1.91 | 0.30 | 0.53 | 0.20 |
| G018037 | 94.50 | 0.54 | 1.64 | 0.03 | 1.18 | 0.23 |
| G018038 | 90.91 | 0.00 | 1.11 | 0.00 | 3.74 | 0.00 |
| G018039 | 94.88 | 0.00 | 0.60 | 0.00 | 0.41 | 0.00 |
| G018040 | 44.77 | 1.52 | 0.33 | 0.14 | 0.50 | 0.03 |
| G018041 | 66.56 | 2.05 | 0.60 | 0.30 | 0.27 | 0.20 |
| G018042 | 90.79 | 1.10 | 1.28 | 0.47 | 1.64 | 0.35 |
| G018043 | 94.94 | 0.55 | 0.57 | 0.03 | 0.40 | 0.06 |
| G018044 | 91.71 | 1.61 | 0.89 | 0.40 | 1.25 | 0.20 |
| G018045 | 90.26 | 1.59 | 1.46 | 0.54 | 3.91 | 1.89 |
| G018046 | 94.59 | 1.33 | 0.76 | 0.05 | 2.03 | 0.64 |
| G018047 | 93.84 | 1.32 | 0.46 | 0.08 | 2.03 | 0.64 |
| G018048 | 95.20 | 2.58 | 0.54 | 0.52 | 0.62 | 0.30 |
| G018049 | 89.68 | 2.09 | 0.17 | 0.23 | 0.45 | 0.30 |
| G018050 | 95.74 | 0.65 | 0.31 | 0.22 | 0.84 | 0.39 |
| G018051 | 92.47 | 0.90 | 0.54 | 0.76 | 0.73 | 0.31 |
| G018052 | 93.14 | 0.85 | 1.39 | 0.91 | 0.85 | 0.78 |
| G018053 | 78.88 | 3.77 | 0.74 | 0.13 | 0.52 | 0.34 |
| G018054 | 92.69 | 1.11 | 0.79 | 0.10 | 2.55 | 0.46 |
| G018055 | 89.68 | 1.52 | 0.48 | 0.57 | 1.05 | 0.36 |
| G018056 | 94.00 | 1.10 | 0.45 | 0.14 | 1.85 | 0.99 |
| G018057 | 89.87 | 0.49 | 0.72 | 0.04 | 1.31 | 0.31 |
| G018058 | 91.04 | 0.77 | 0.59 | 0.12 | 1.46 | 0.28 |
| G018059 | 49.64 | 3.56 | 0.46 | 0.19 | 1.56 | 0.43 |
| G018060 | 97.65 | 0.65 | 1.22 | 0.17 | 1.13 | 0.47 |
| G018061 | 92.52 | 0.29 | 0.89 | 0.33 | 2.76 | 0.52 |
| G018062 | 88.19 | 0.72 | 0.84 | 0.18 | 6.65 | 0.41 |
| G018063 | 92.94 | 0.63 | 1.54 | 0.20 | 0.94 | 0.38 |
| G018064 | 94.14 | 1.12 | 1.38 | 0.31 | 0.97 | 0.09 |
| G018065 | 93.20 | 1.50 | 1.32 | 0.57 | 0.91 | 0.23 |
| G018066 | 91.62 | 0.45 | 1.69 | 0.06 | 0.45 | 0.17 |
| G018067 | 92.72 | 1.43 | 3.06 | 0.48 | 0.42 | 0.15 |
| G018068 | 93.33 | 0.49 | 0.62 | 0.08 | 0.27 | 0.06 |
| G018069 | 93.83 | 0.77 | 0.94 | 0.33 | 0.99 | 0.07 |
| G018070 | 94.61 | 0.57 | 0.59 | 0.08 | 1.33 | 0.35 |
| G018071 | 87.61 | 0.46 | 0.26 | 0.22 | 1.10 | 0.29 |
| G018072 | 92.86 | 0.84 | 1.76 | 0.04 | 0.34 | 0.06 |
| G018073 | 87.03 | 0.52 | 1.48 | 0.33 | 0.40 | 0.15 |
| G018074 | 80.06 | 11.41 | 0.42 | 0.13 | 0.46 | 0.24 |
| G018075 | 92.85 | 0.27 | 0.59 | 0.37 | 0.61 | 0.08 |
| G018076 | 95.88 | 1.59 | 0.56 | 0.38 | 0.61 | 0.30 |
| G018077 | 0.23 | 0.12 | 0.55 | 0.26 | 0.13 | 0.08 |
| G018078 | 94.97 | 1.42 | 0.48 | 0.16 | 0.44 | 0.22 |
| G018079 | 89.45 | 1.79 | 0.38 | 0.26 | 0.81 | 0.47 |
| G018080 | 80.86 | 3.14 | 0.22 | 0.15 | 0.58 | 0.35 |
| G018081 | 93.61 | 0.63 | 0.17 | 0.14 | 0.91 | 0.44 |
| G018082 | 93.15 | 1.21 | 0.16 | 0.07 | 1.80 | 0.50 |
| G018083 | 78.69 | 0.88 | 0.29 | 0.13 | 2.73 | 0.50 |
| G018084 | 81.88 | 0.70 | 0.43 | 0.19 | 1.39 | 0.60 |
| G018085 | 93.17 | 1.26 | 0.44 | 0.16 | 2.62 | 0.43 |
| G018086 | 95.03 | 1.07 | 0.61 | 0.20 | 1.39 | 0.44 |
| G018087 | 94.37 | 1.49 | 1.07 | 0.79 | 1.41 | 0.21 |
| G018088 | 91.62 | 1.31 | 1.01 | 0.43 | 1.91 | 0.99 |
| G018089 | 94.41 | 1.17 | 0.75 | 0.41 | 3.04 | 1.52 |
| G018090 | 93.66 | 0.82 | 0.54 | 0.28 | 3.12 | 0.96 |
| G018091 | 96.82 | 0.00 | 0.60 | 0.00 | 0.77 | 0.00 |
| G018092 | 90.55 | 1.58 | 0.74 | 0.27 | 2.02 | 0.34 |
| G018093 | 94.46 | 0.49 | 1.13 | 0.13 | 0.96 | 0.28 |
| G018094 | 82.55 | 5.17 | 0.55 | 0.11 | 12.35 | 6.02 |
| G018095 | 94.60 | 0.85 | 1.94 | 0.68 | 0.75 | 0.21 |
| G018096 | 54.68 | 0.62 | 1.99 | 0.16 | 0.38 | 0.12 |
| G018097 | 91.89 | 2.73 | 0.96 | 0.89 | 1.01 | 0.80 |
| G018098 | 70.42 | 0.00 | 0.35 | 0.00 | 0.00 | 0.00 |
| G018099 | 96.84 | 0.16 | 0.43 | 0.10 | 0.64 | 0.16 |
| G018100 | 93.24 | 1.08 | 0.77 | 0.20 | 3.07 | 0.06 |
| G018101 | 92.34 | 0.51 | 2.16 | 0.73 | 3.06 | 0.06 |
| G018102 | 91.87 | 0.99 | 0.42 | 0.34 | 0.61 | 0.16 |
| G018103 | 94.50 | 1.22 | 0.59 | 0.22 | 1.25 | 0.53 |
| G018104 | 94.14 | 0.76 | 0.31 | 0.14 | 1.09 | 0.65 |
| G018105 | 95.51 | 0.98 | 0.42 | 0.14 | 0.82 | 0.21 |
| G018106 | 94.77 | 0.90 | 1.12 | 0.18 | 2.15 | 0.28 |
| G018107 | 94.66 | 0.57 | 0.80 | 0.03 | 2.09 | 0.04 |
| G018108 | 94.77 | 1.14 | 1.23 | 0.70 | 1.55 | 0.96 |
| G018109 | 94.40 | 1.37 | 1.06 | 0.91 | 1.80 | 0.67 |
| G018110 | 92.19 | 1.30 | 1.86 | 0.34 | 4.04 | 0.77 |
| G018111 | 91.96 | 3.12 | 0.72 | 0.17 | 5.54 | 3.11 |
| G018112 | 91.54 | 1.34 | 0.80 | 0.15 | 5.69 | 0.44 |
| G018113 | 96.42 | 0.45 | 0.43 | 0.22 | 1.40 | 0.35 |
| G018114 | 95.95 | 0.89 | 0.79 | 0.32 | 0.27 | 0.20 |
| G018115 | 92.89 | 1.00 | 0.59 | 0.16 | 1.10 | 0.40 |
| G018116 | 91.94 | 0.57 | 0.99 | 0.54 | 0.61 | 0.24 |
| G018117 | 95.48 | 1.10 | 0.62 | 0.31 | 0.55 | 0.31 |
| G018118 | 96.20 | 0.38 | 0.43 | 0.31 | 0.46 | 0.17 |
| G018119 | 83.25 | 1.31 | 0.43 | 0.08 | 0.44 | 0.25 |
| G018120 | 97.00 | 0.72 | 0.42 | 0.26 | 0.38 | 0.20 |
| G018121 | 95.42 | 0.58 | 0.50 | 0.13 | 0.42 | 0.15 |

### Example 42—Screening CIITA sgRNAs in Dose-Response with BC22n in T Cells

[0783] Highly efficient CIITA sgRNAs identified in Example 41 were further assayed for base editing efficacy at multiple guide concentrations in T cells. The potency of each was assayed for genome editing efficacy by NGS or by disruption of surface protein expression of HLA-DR, DP, DQ by flow cytometry.

### Example 42.1 T Cell Preparation

[0784] Healthy human donor apheresis was obtained commercially (Hemacare), and cells were washed and resuspended in in CliniMACS® PBS/EDTA buffer (Miltenyi Biotec Cat. 130-070-525) and processed in a MultiMACS™ Cell 24 Separator Plus device (Miltenyi Biotec). T cells were isolated via positive selection using a Straight from Leukopak® CD4/CD8 MicroBead kit, human (Miltenyi Biotec Cat. 130-122-352). T cells were aliquoted and cryopreserved for future use in Cryostor® CS10 (StemCell Technologies Cat. 07930).

[0785] Upon thaw, T cells were plated at a density of 1.0×10\hat{ }6 cells/mL in T cell growth media (TCGM) composed of CTS OpTmizer T Cell Expansion SFM and T Cell Expansion Supplement (ThermoFisher Cat. A1048501), 5% human AB serum (GeminiBio, Cat. 100-512), 1× Penicillin-Streptomycin, 1× Glutamax, 10 mM HEPES, 200 U/mL recombinant human interleukin-2 (Peprotech, Cat. 200-02), 5 ng/mL recombinant human interleukin 7 (Peprotech, Cat. 200-07), and 5 ng/mL recombinant human interleukin 15 (Peprotech, Cat. 200-15). T cells were rested in this media for 24 hours, at which time they were activated with T Cell TransAct™ human reagent (Miltenyi, Cat. 130-111-160) added at a 1:100 ratio by volume. T cells were activated for 48 hours prior to electroporation.

### Example 42.2 T Cell Editing with RNA Electroporation

[0786] Solutions containing mRNAs encoding BC22n (SEQ ID NO: 1) and UGI (SEQ ID NO: 34) were prepared in P3 buffer. 100 μM CIITA targeting sgRNAs were removed from their storage plates and denatured for 2 minutes at 95° C. and incubated at room temperature for 5 minutes. Forty-eight hours post activation, T cells were harvested, centrifuged, and resuspended at a concentration of 12.5×10\hat{ }⁶ T cells/mL in P3 electroporation buffer (Lonza). Each sgRNA was serially diluted in ratio of 1:2 in P3 electroporation buffer starting from 60 pmols in a 96-well PCR plate in duplicate. Following dilution, 1×10\hat{ }⁵ T cells, 20 ng/μL of BC22n mRNAs, and 20 ng/μL of UGI mRNA were mixed with sgRNA plate to make the final volume of 20 μL of P3 electroporation buffer. This mix was transferred to 4 corresponding 96-well Nucleofector™ plates and electroporated using the manufacturer's pulse code. Electroporated T cells were immediately rested in 80 μL of CTS Optimizer T cell growth media without cytokines for 15 minutes before being transferred to new flat-bottom 96-well plates containing an additional 80 μL of CTS OpTmizer T cell growth media supplemented with 2× cytokines. The resulting plates were incubated at 37° C. for 7 days. On day 4 post-electroporation, cells were

[0787] split 1:2 in two U-bottom plates, and one plate was collected for NGS sequencing, while the other plate was replenished with CTS Optimizer fresh media with 1× cytokines. This plate was used for flow cytometry on Day 7.

### Example 42.3 Flow Cytometry and NGS Sequencing

[0788] On day 7 post-editing, T cells were assayed by flow cytometry to determine surface expression of HLA-DR, DP, DQ. Briefly, T cells were incubated for 30 minutes at 4° C. with a mixture of antibodies diluted in cell staining buffer (BioLegend, Cat. No. 420201). Antibodies against CD3 (BioLegend, Cat. No. 317336), CD4 (BioLegend, Cat. No. 317434), CD8 (BioLegend, Cat. No. 301046), and Viakrome (Beckman Coulter, Cat. No. C36628) were diluted at 1:100, and antibodies against HLA II-DR, DP, DQ (BioLegend, Cat. No. 361714) were diluted at 1:50. Cells were subsequently washed, resuspended in 100 μL of cell staining buffer and processed on a Cytoflex flow cytometer (Beckman Coulter). Flow cytometry data was analyzed using the FlowJo software package. T cells were gated based on size, shape, viability, CD8, and HLA-DR, DP, DQ.

[0789] Table 106 shows CIITA editing outcomes and the percentage of T cells negative for HLA-DR, DP, DQ in T cells following base editing with BC22n.

TABLE 106
Percent editing and percent of HLA II-DP, DQ, DR negative cells following
CIITA editing with BC22n base editor

| | sgRNA | C > T | | | % HLA II-DR, DP, DQ | | | % CD74 | | |
|---|---|---|---|---|---|---|---|---|---|---|
| | (pmols) | Ave | SD | N | Ave | SD | N | Ave | SD | N |
| G016064 | 60 | 96.20% | 0.69% | 2 | 99.65 | 0.07 | 2 | 96.2 | 0.14 | 2 |
| | 30 | 94.85% | 0.69% | 2 | 99.15 | 0.35 | 2 | 92.65 | 0.21 | 2 |
| | 15 | 90.26% | 0.03% | 2 | 96.70 | 0.28 | 2 | 90.15 | 2.19 | 2 |
| | 7.5 | 72.95% | 1.76% | 2 | 87.45 | 1.20 | 2 | 80.95 | 3.32 | 2 |
| | 3.75 | 49.55% | 2.09% | 2 | 73.05 | 0.64 | 2 | 66.35 | 4.31 | 2 |
| | 1.88 | 28.63% | 1.34% | 2 | 59.40 | 1.70 | 2 | 55.2 | 5.8 | 2 |
| | 0.94 | 14.98% | 0.01% | 2 | 54.60 | 2.40 | 2 | 46.9 | 1.84 | 2 |
| | 0 | 0.26% | 0.02% | 2 | 46.70 | 5.52 | 2 | 45.15 | 0.49 | 2 |
| G016068 | 60 | 97.40% | 0.87% | 2 | 99.70 | 0.00 | 2 | 94.25 | 1.2 | 2 |
| | 30 | 90.31% | 0.83% | 2 | 93.15 | 0.07 | 2 | 85.15 | 1.2 | 2 |
| | 15 | 75.08% | 0.17% | 2 | 82.45 | 0.21 | 2 | 74.65 | 1.48 | 2 |
| | 7.5 | 49.64% | 2.08% | 2 | 68.65 | 1.91 | 2 | 57 | 1.27 | 2 |
| | 3.75 | 28.95% | 1.51% | 2 | 57.85 | 1.63 | 2 | 43.9 | 1.27 | 2 |
| | 1.88 | 14.90% | 0.58% | 2 | 51.10 | 2.26 | 2 | 35.85 | 3.75 | 2 |
| | 0.94 | 7.11% | 0.22% | 2 | 49.50 | 4.67 | 2 | 38.2 | 4.1 | 2 |
| | 0 | 0.21% | 0.02% | 2 | 51.50 | 1.13 | 2 | 44.8 | 1.56 | 2 |
| G016074 | 60 | 96.62% | | 2 | 96.95 | 0.21 | 2 | 90.6 | 0.28 | 2 |
| | 30 | 94.89% | 0.58% | 2 | 93.50 | 1.27 | 2 | 85.45 | 1.06 | 2 |
| | 15 | 89.79% | 3.18% | 2 | 88.50 | 0.28 | 2 | 80.35 | 0.64 | 2 |
| | 7.5 | 72.00% | 1.61% | 2 | 77.75 | 0.35 | 2 | 68.35 | 1.77 | 2 |
| | 3.75 | 47.99% | 0.39% | 2 | 65.30 | 1.84 | 2 | 53.05 | 1.91 | 2 |
| | 1.88 | 27.92% | 0.44% | 2 | 57.60 | 0.14 | 2 | 45 | 0.42 | 2 |
| | 0.94 | 13.11% | 1.79% | 2 | 54.30 | 0.71 | 2 | 37.9 | 0 | 2 |
| | 0 | 0.41% | 0.13% | 2 | 49.15 | 2.05 | 2 | 44.05 | 1.91 | 2 |
| G016076 | 60 | 96.03% | 0.07% | 2 | 94.30 | 0.14 | 2 | 90 | 0.71 | 2 |
| | 30 | 93.29% | ND | 2 | 89.10 | 0.99 | 2 | 81.65 | 1.48 | 2 |
| | 15 | 80.74% | 0.41% | 2 | 83.55 | 0.35 | 2 | 74.1 | 0.85 | 2 |
| | 7.5 | 51.33% | 1.82% | 2 | 69.05 | 1.91 | 2 | 57.7 | 2.97 | 2 |
| | 3.75 | 28.40% | 2.41% | 2 | 58.90 | 2.26 | 2 | 43.15 | 0.64 | 2 |
| | 1.88 | 15.12% | 1.91% | 2 | 56.05 | 0.78 | 2 | 38.45 | 1.77 | 2 |
| | 0.94 | 7.23% | 0.26% | 2 | 52.80 | 0.71 | 2 | 38.2 | 0.28 | 2 |
| | 0 | 0.27% | 0.00% | 2 | 47.70 | 1.70 | 2 | 43.5 | 3.68 | 2 |
| G016086 | 60 | 97.81% | 0.16% | 2 | 99.25 | 0.35 | 2 | 94.35 | 0.92 | 2 |
| | 30 | ND | ND | 2 | 98.65 | 0.07 | 2 | 90.25 | 1.2 | 2 |
| | 15 | ND | ND | 2 | 98.20 | 0.28 | 2 | 88.8 | 1.98 | 2 |
| | 7.5 | 97.19% | 1.91% | 2 | 95.85 | 0.07 | 2 | 87.5 | 0.14 | 2 |
| | 3.75 | ND | ND | 2 | 87.10 | 0.28 | 2 | 74.95 | 2.47 | 2 |
| | 1.88 | ND | ND | 2 | 72.45 | 0.07 | 2 | 60.75 | 2.76 | 2 |
| | 0.94 | ND | ND | 2 | 59.10 | 0.85 | 2 | 48.05 | 3.89 | 2 |
| | 0 | ND | ND | 2 | 50.65 | 2.76 | 2 | 46.15 | 2.19 | 2 |
| G016091 | 60 | ND | ND | 2 | 98.05 | 0.07 | 2 | 89.85 | 0.21 | 2 |
| | 30 | ND | ND | 2 | 96.95 | 0.07 | 2 | 87.9 | 0.85 | 2 |
| | 15 | ND | ND | 2 | 91.40 | 1.84 | 2 | 83.65 | 2.76 | 2 |
| | 7.5 | ND | ND | 2 | 82.00 | 1.27 | 2 | 74 | 3.11 | 2 |
| | 3.75 | ND | ND | 2 | 69.70 | 0.99 | 2 | 62.75 | 2.33 | 2 |
| | 1.88 | ND | ND | 2 | 59.40 | 1.41 | 2 | 54.4 | 3.54 | 2 |
| | 0.94 | ND | ND | 2 | 54.25 | 2.05 | 2 | 46.3 | 5.09 | 2 |
| | 0 | ND | ND | 2 | 46.30 | 2.26 | 2 | 48.3 | 4.67 | 2 |
| G016115 | 60 | 93.33% | 0.70% | 2 | 96.80 | 0.14 | 2 | 92.55 | 0.07 | 2 |
| | 30 | 94.46% | 0.23% | 2 | 92.70 | 1.41 | 2 | 87.8 | 1.98 | 2 |
| | 15 | 93.51% | 0.70% | 2 | 89.85 | 0.35 | 2 | 82.75 | 3.75 | 2 |
| | 7.5 | 90.13% | 0.37% | 2 | 83.35 | 0.35 | 2 | 78.35 | 2.47 | 2 |
| | 3.75 | 75.18% | 1.51% | 2 | 71.40 | 1.27 | 2 | 65.5 | 2.4 | 2 |
| | 1.88 | 51.65% | 1.64% | 2 | 64.20 | 4.95 | 2 | 56.1 | 1.84 | 2 |
| | 0.94 | 30.19% | 2.14% | 2 | 55.25 | 3.04 | 2 | 49.15 | 4.88 | 2 |
| | 0 | 0.26% | 0.03% | 2 | 46.85 | 7.57 | 2 | 47.1 | 3.25 | 2 |
| G016084 | 60 | 73.43% | 0.13% | 2 | 97.00 | 0.14 | 2 | 91.35 | 1.06 | 2 |
| | 30 | 73.70% | 0.38% | 2 | 94.80 | 0.42 | 2 | 84.9 | 0.42 | 2 |
| | 15 | 67.30% | 1.19% | 2 | 91.60 | 0.71 | 2 | 80.6 | 0.57 | 2 |
| | 7.5 | 48.91% | 0.27% | 2 | 80.20 | 0.00 | 2 | 67.5 | 0.42 | 2 |
| | 3.75 | 28.24% | 0.35% | 2 | 67.50 | 0.57 | 2 | 51.85 | 3.18 | 2 |
| | 1.88 | 16.89% | 0.30% | 2 | 59.05 | 2.76 | 2 | 42.7 | 0.14 | 2 |
| | 0.94 | 7.42% | 0.06% | 2 | 54.65 | 0.92 | 2 | 40.05 | 0.78 | 2 |
| | 0 | 1.06% | 0.06% | 2 | 49.25 | 2.47 | 2 | 46.9 | 1.98 | 2 |
| G016090 | 60 | 87.05% | 2.52% | 2 | 98.70 | 1.27 | 2 | 93.25 | 2.19 | 2 |
| | 30 | 88.93% | 0.06% | 2 | 98.90 | 0.14 | 2 | 91 | 0.99 | 2 |
| | 15 | 89.51% | 0.24% | 2 | 98.70 | 0.28 | 2 | 90.45 | 0.21 | 2 |
| | 7.5 | 83.78% | 0.02% | 2 | 93.80 | 0.57 | 2 | 85.05 | 0.07 | 2 |
| | 3.75 | 66.23% | 0.40% | 2 | 83.35 | 1.06 | 2 | 72.35 | 0.35 | 2 |
| | 1.88 | 44.49% | 0.27% | 2 | 69.50 | 0.57 | 2 | 57.75 | 1.34 | 2 |
| | 0.94 | 22.90% | 1.49% | 2 | 57.25 | 1.77 | 2 | 45.15 | 2.47 | 2 |
| | 0 | 0.61% | 0.14% | 2 | 49.55 | 1.63 | 2 | 47.5 | 4.1 | 2 |
| G016032 | 60 | 91.66% | 0.76% | 2 | 99.35 | 0.07 | 2 | 93.65 | 2.05 | 2 |
| | 30 | 86.77% | 2.13% | 2 | 94.25 | 1.06 | 2 | 87.45 | 1.63 | 2 |
| | 15 | 75.23% | 1.22% | 2 | 86.10 | 2.26 | 2 | 74.65 | 0.78 | 2 |
| | 7.5 | 54.08% | 0.63% | 2 | 74.10 | 0.85 | 2 | 60.65 | 1.34 | 2 |
| | 3.75 | 33.34% | 2.39% | 2 | 63.20 | 3.82 | 2 | 45.95 | 3.75 | 2 |
| | 1.88 | 16.30% | 1.21% | 2 | 57.20 | 0.57 | 2 | 39.7 | 0.28 | 2 |
| | 0.94 | 7.33% | 0.38% | 2 | 53.10 | 0.85 | 2 | 37.6 | 1.13 | 2 |
| | 0 | 0.33% | 0.00% | 2 | 52.65 | 4.31 | 2 | 47.75 | 2.62 | 2 |
| G016067 | 60 | 97.37% | 0.56% | 2 | 93.10 | 0.14 | 2 | 85.95 | 2.19 | 2 |
| | 30 | 97.47% | 0.36% | 2 | 93.00 | 0.28 | 2 | 81.8 | 3.54 | 2 |
| | 15 | 95.78% | 0.13% | 2 | 89.30 | 1.41 | 2 | 79.45 | 0.49 | 2 |
| | 7.5 | 86.53% | 0.24% | 2 | 81.05 | 2.19 | 2 | 71 | 2.26 | 2 |
| | 3.75 | 68.12% | 1.27% | 2 | 69.35 | 1.20 | 2 | 58.3 | 2.4 | 2 |
| | 1.88 | 43.82% | 0.48% | 2 | 57.70 | 1.98 | 2 | 48.2 | 0.99 | 2 |
| | 0.94 | 22.80% | 1.26% | 2 | 54.95 | 0.35 | 2 | 42.55 | 1.34 | 2 |
| | 0 | 0.14% | 0.06% | 2 | 49.55 | 1.63 | 2 | 43.7 | 1.98 | 2 |
| G018067 | 60 | 95.58% | 0.35% | 2 | 99.40 | 0.00 | 2 | 91.45 | 1.34 | 2 |
| | 30 | 94.13% | 0.08% | 2 | 98.90 | 0.42 | 2 | 91.75 | 1.63 | 2 |
| | 15 | 91.49% | 0.05% | 2 | 95.95 | 0.21 | 2 | 89.45 | 0.07 | 2 |
| | 7.5 | 77.17% | 1.50% | 2 | 83.95 | 0.92 | 2 | 76.6 | 0.57 | 2 |
| | 3.75 | 56.15% | 1.07% | 2 | 71.00 | 0.71 | 2 | 63.65 | 4.03 | 2 |
| | 1.88 | 32.76% | 0.32% | 2 | 57.65 | 3.46 | 2 | 50.6 | 3.39 | 2 |
| | 0.94 | 17.47% | 0.95% | 2 | 50.85 | 3.04 | 2 | 46.1 | 3.82 | 2 |
| | 0 | 0.41% | 0.01% | 2 | 49.45 | 5.16 | 2 | 47.85 | 1.91 | 2 |
| G018075 | 60 | 96.12% | 1.35% | 2 | 98.25 | 0.07 | 2 | 92 | 1.27 | 2 |
| | 30 | 94.07% | 3.53% | 2 | 97.45 | 1.06 | 2 | 88.65 | 2.76 | 2 |
| | 15 | 92.08% | 0.90% | 2 | 97.10 | 0.14 | 2 | 87.25 | 2.05 | 2 |
| | 7.5 | 83.76% | 3.28% | 2 | 90.65 | 0.21 | 2 | 80.1 | 2.69 | 2 |
| | 3.75 | 67.35% | 2.13% | 2 | 78.85 | 0.21 | 2 | 67.1 | 2.97 | 2 |
| | 1.88 | 42.66% | 2.51% | 2 | 63.65 | 0.07 | 2 | 52.55 | 2.33 | 2 |
| | 0.94 | 25.54% | 0.32% | 2 | 56.55 | 3.75 | 2 | 43.1 | 3.25 | 2 |
| | 0 | 0.23% | 0.02% | 2 | 48.70 | 1.84 | 2 | 42.1 | 0.42 | 2 |
| G018091 | 60 | 97.80% | ND | 2 | 99.65 | 0.21 | 2 | 92.2 | 0.57 | 2 |
| | 30 | 96.32% | 0.91% | 2 | 97.50 | 0.28 | 2 | 88.7 | 1.7 | 2 |
| | 15 | 84.48% | 2.73% | 2 | 91.90 | 0.71 | 2 | 82.1 | 0.71 | 2 |
| | 7.5 | 76.56% | 0.49% | 2 | 78.05 | 1.63 | 2 | 64.15 | 0.35 | 2 |
| | 3.75 | 52.08% | 1.50% | 2 | 67.00 | 1.56 | 2 | 46.8 | 1.84 | 2 |
| | 1.88 | 30.00% | 2.36% | 2 | 58.80 | 2.55 | 2 | 40.7 | 2.4 | 2 |
| | 0.94 | 15.01% | 1.12% | 2 | 50.70 | 2.26 | 2 | 33 | 2.83 | 2 |
| | 0 | 0.00% | 0.00% | 2 | 47.90 | 1.70 | 2 | 39 | 0 | 2 |
| G018100 | 60 | 95.55% | 0.47% | 2 | 94.30 | 0.57 | 2 | 85.3 | 2.69 | 2 |
| | 30 | 95.22% | 1.02% | 2 | 91.75 | 0.78 | 2 | 79.1 | 0.85 | 2 |
| | 15 | 93.33% | 0.49% | 2 | 90.80 | 0.99 | 2 | 77.1 | 0.28 | 2 |
| | 7.5 | 88.77% | 0.15% | 2 | 84.40 | 0.85 | 2 | 69.9 | 1.56 | 2 |
| | 3.75 | 71.03% | 4.26% | 2 | 75.20 | 2.40 | 2 | 54.4 | 0.57 | 2 |
| | 1.88 | 46.87% | 1.95% | 2 | 63.80 | 0.28 | 2 | 45.7 | 0.28 | 2 |
| | 0.94 | 27.20% | 0.21% | 2 | 54.80 | 1.56 | 2 | 36.5 | 2.4 | 2 |
| | 0 | 0.17% | 0.04% | 2 | 52.25 | 1.63 | 2 | 42.8 | 0 | 2 |
| G018102 | 60 | 93.32% | 0.10% | 2 | 93.00 | 0.14 | 2 | 84.65 | 0.64 | 2 |
| | 30 | 77.08% | 2.22% | 2 | 80.40 | 1.84 | 2 | 68.7 | 2.55 | 2 |
| | 15 | 52.42% | 1.28% | 2 | 70.50 | 0.28 | 2 | 55.4 | 0.85 | 2 |
| | 7.5 | 31.87% | 0.20% | 2 | 58.80 | 4.53 | 2 | 39.4 | 4.38 | 2 |
| | 3.75 | 16.76% | 0.26% | 2 | 56.85 | 1.63 | 2 | 33.65 | 0.07 | 2 |
| | 1.88 | 8.18% | 0.06% | 2 | 54.15 | 0.21 | 2 | 30.35 | 0.92 | 2 |
| | 0.94 | 4.12% | 0.66% | 2 | 52.25 | 3.32 | 2 | 32.2 | 0.57 | 2 |
| | 0 | 0.28% | 0.12% | 2 | 50.00 | 3.68 | 2 | 42.45 | 4.17 | 2 |
| G018103 | 60 | 96.34% | 0.21% | 2 | 98.85 | 0.07 | 2 | 89.2 | 2.12 | 2 |
| | 30 | 90.93% | 0.17% | 2 | 95.15 | 0.92 | 2 | 84.95 | 0.07 | 2 |
| | 15 | 80.01% | 0.34% | 2 | 87.95 | 1.63 | 2 | 76.7 | 0.14 | 2 |
| | 7.5 | 59.92% | 0.48% | 2 | 70.90 | 2.97 | 2 | 56.45 | 3.18 | 2 |
| | 3.75 | 36.07% | 1.23% | 2 | 62.05 | 2.33 | 2 | 44.65 | 0.49 | 2 |
| | 1.88 | 19.59% | 2.15% | 2 | 58.65 | 2.76 | 2 | 38.2 | 1.41 | 2 |
| | 0.94 | 7.98% | 0.08% | 2 | 52.75 | 0.07 | 2 | 33.25 | 2.62 | 2 |
| | 0 | 0.22% | 0.03% | 2 | 50.95 | 0.64 | 2 | 43.1 | 2.69 | 2 |
| G018107 | 60 | ND | ND | 2 | 99.50 | 0.14 | 2 | 89.05 | 0.07 | 2 |
| | 30 | ND | ND | 2 | 99.05 | 0.07 | 2 | 91.1 | 0.85 | 2 |
| | 15 | ND | ND | 2 | 97.05 | 0.64 | 2 | 90 | 3.25 | 2 |
| | 7.5 | ND | ND | 2 | 90.45 | 0.07 | 2 | 83.25 | 2.76 | 2 |
| | 3.75 | ND | ND | 2 | 79.60 | 0.99 | 2 | 72.3 | 2.4 | 2 |
| | 1.88 | ND | ND | 2 | 66.20 | 2.26 | 2 | 58.7 | 4.81 | 2 |
| | 0.94 | ND | ND | 2 | 53.40 | 1.41 | 2 | 45.55 | 3.89 | 2 |
| | 0 | ND | ND | 2 | 51.65 | 2.05 | 2 | 47.35 | 4.03 | 2 |
| G018111 | 60 | 96.87% | 0.26% | 2 | 95.65 | 0.49 | 2 | 92.45 | 0.35 | 2 |
| | 30 | 95.44% | 0.07% | 2 | 89.40 | 0.71 | 2 | 86.5 | 0.42 | 2 |
| | 15 | 89.11% | 0.91% | 2 | 81.35 | 0.07 | 2 | 75.75 | 2.62 | 2 |
| | 7.5 | 71.93% | 0.55% | 2 | 70.05 | 3.32 | 2 | 61.15 | 0.21 | 2 |
| | 3.75 | 47.48% | 0.33% | 2 | 56.45 | 5.02 | 2 | 48.5 | 0.14 | 2 |
| | 1.88 | 25.72% | 1.46% | 2 | 59.00 | 3.11 | 2 | 44.95 | 0.07 | 2 |
| | 0.94 | 12.27% | 0.79% | 2 | 51.30 | 3.39 | 2 | 42.3 | 0.99 | 2 |
| | 0 | 0.15% | 0.01% | 2 | 51.00 | 3.25 | 2 | 45.1 | 1.41 | 2 |
| G018116 | 60 | 86.65% | 0.01% | 2 | 92.95 | 0.35 | 2 | 87.7 | 0.42 | 2 |
| | 30 | 62.59% | 0.13% | 2 | 79.90 | 1.84 | 2 | 69.75 | 2.9 | 2 |
| | 15 | 40.44% | 1.09% | 2 | 69.90 | 0.71 | 2 | 60.15 | 1.34 | 2 |
| | 7.5 | 23.19% | 2.46% | 2 | 60.35 | 4.74 | 2 | 45.45 | 0.92 | 2 |
| | 3.75 | 10.65% | 0.83% | 2 | 55.45 | 1.91 | 2 | 40.2 | 1.41 | 2 |
| | 1.88 | 5.63% | 0.47% | 2 | 56.85 | 1.06 | 2 | 40.75 | 0.64 | 2 |
| | 0.94 | 1.93% | 0.33% | 2 | 57.80 | 3.96 | 2 | 40 | 0.14 | 2 |
| | 0 | 0.19% | 0.10% | 2 | 50.55 | 0.21 | 2 | 47 | 1.41 | 2 |
| G018117 | 60 | 98.01% | 0.17% | 2 | 99.65 | 0.07 | 2 | 93.65 | 0.49 | 2 |
| | 30 | 97.14% | 0.69% | 2 | 99.20 | 0.14 | 2 | 92.35 | 0.07 | 2 |
| | 15 | 93.65% | 0.39% | 2 | 97.75 | 0.64 | 2 | 91.55 | 0.21 | 2 |
| | 7.5 | 81.77% | 0.50% | 2 | 91.60 | 0.42 | 2 | 81.85 | 0.35 | 2 |
| | 3.75 | 56.56% | 2.70% | 2 | 80.55 | 3.46 | 2 | 69.25 | 3.32 | 2 |
| | 1.88 | 33.70% | 3.00% | 2 | 69.30 | 1.13 | 2 | 56.8 | 2.69 | 2 |
| | 0.94 | 17.14% | 0.83% | 2 | 60.40 | 1.84 | 2 | 48.25 | 1.34 | 2 |
| | 0 | 0.18% | 0.01% | 2 | 51.95 | 2.76 | 2 | 46.5 | 1.13 | 2 |
| G018118 | 60 | 98.36% | 0.27% | 2 | 99.65 | 0.07 | 2 | 94.35 | 0.49 | 2 |
| | 30 | 97.70% | 0.19% | 2 | 99.45 | 0.21 | 2 | 88.35 | 8.13 | 2 |
| | 15 | 94.59% | 1.64% | 2 | 98.30 | 0.14 | 2 | 90.45 | 0.21 | 2 |
| | 7.5 | 83.77% | 2.47% | 2 | 92.80 | 1.13 | 2 | 81.2 | 0.57 | 2 |
| | 3.75 | 64.07% | 0.54% | 2 | 81.25 | 1.06 | 2 | 71.5 | 1.56 | 2 |
| | 1.88 | 40.72% | 2.16% | 2 | 70.65 | 2.90 | 2 | 61.15 | 3.18 | 2 |
| | 0.94 | 22.33% | 3.64% | 2 | 63.90 | 0.85 | 2 | 51.05 | 2.76 | 2 |
| | 0 | 0.14% | 0.02% | 2 | 52.95 | 1.48 | 2 | 47.85 | 1.77 | 2 |
| G018120 | 60 | 98.22% | 0.32% | 2 | 99.10 | 0.14 | 2 | 91.65 | 0.78 | 2 |
| | 30 | 96.96% | 0.43% | 2 | 99.15 | 0.07 | 2 | 89.1 | 0.57 | 2 |
| | 15 | 93.71% | 0.19% | 2 | 97.05 | 0.21 | 2 | 88.15 | 0.64 | 2 |
| | 7.5 | 82.19% | 1.50% | 2 | 90.25 | 0.78 | 2 | 80 | 0.99 | 2 |
| | 3.75 | 61.25% | 1.50% | 2 | 80.30 | 1.56 | 2 | 66.45 | 1.77 | 2 |
| | 1.88 | 37.98% | 1.29% | 2 | 68.85 | 0.78 | 2 | 52.75 | 3.04 | 2 |
| | 0.94 | 18.96% | 0.67% | 2 | 59.85 | 0.64 | 2 | 47.25 | 2.19 | 2 |
| | 0 | 0.17% | 0.02% | 2 | 49.60 | 0.57 | 2 | 46.1 | 0.99 | 2 |
| G018121 | 60 | 97.55% | 0.01% | 2 | 97.25 | 0.35 | 2 | 87.45 | 0.35 | 2 |
| | 30 | 92.24% | 0.98% | 2 | 92.50 | 0.71 | 2 | 83.6 | 3.96 | 2 |
| | 15 | 78.58% | 0.52% | 2 | 84.90 | 0.28 | 2 | 76.85 | 2.9 | 2 |
| | 7.5 | 57.37% | 0.50% | 2 | 73.75 | 3.04 | 2 | 64.5 | 3.25 | 2 |
| | 3.75 | 35.06% | 0.53% | 2 | 60.70 | 0.00 | 2 | 50.5 | 3.25 | 2 |
| | 1.88 | 18.80% | 2.81% | 2 | 61.00 | 1.41 | 2 | 45.95 | 4.31 | 2 |
| | 0.94 | 9.25% | 0.17% | 2 | 56.95 | 4.31 | 2 | 42.8 | 1.7 | 2 |
| | 0 | 0.21% | 0.00% | 2 | 47.45 | 3.04 | 2 | 44.55 | 1.34 | 2 |

### Example 43. Additional Embodiments

[0790] The following numbered embodiments provide additional support for and descriptions of the embodiments herein.
[0791] Embodiment A1. An mRNA comprising an open reading frame encoding a polypeptide comprising an APOBEC3A deaminase (A3A) and an RNA-guided nickase, wherein the polypeptide does not comprise a uracil glycosylase inhibitor (UGI).
[0792] Embodiment A2. A composition comprising a first mRNA comprising a first open reading frame encoding a polypeptide comprising an APOBEC3A deaminase (A3A) and an RNA-guided nickase, and a second mRNA comprising a second open reading frame encoding a uracil glycosylase inhibitor (UGI), wherein the second mRNA is different from the first mRNA, optionally wherein the composition comprises lipid nanoparticles.
[0793] Embodiment A3. The composition of embodiment A2, wherein the first polypeptide does not comprise a UGI.
[0794] Embodiment A4. The composition of embodiment A2 or A3, wherein the molar ratio of the second mRNA to the first mRNA is from 1:1 to 30:1.
[0795] Embodiment A5. A method of modifying a target gene comprising delivering to a cell a first mRNA comprising a first open reading frame encoding a first polypeptide comprising an APOBEC3A deaminase (A3A) and an RNA-guided nickase, a second mRNA comprising a second open reading frame encoding a uracil glycosylase inhibitor (UGI), wherein the second mRNA is different from the first mRNA, and at least one guide RNA (gRNA).
[0796] Embodiment A6. The composition or method of any one of embodiments A2-A5, wherein the molar ratio of the second mRNA to the first mRNA is from 1:1 to 30:1.
[0797] Embodiment A7. The composition or method of any one of embodiments A4-A6, wherein the molar ratio is from 2:1 to 30:1.
[0798] Embodiment A8. The composition or method of any one of embodiments A4-A6, wherein the molar ratio is from 7:1 to 22:1.
[0799] Embodiment A9. A cell comprising a composition comprising a first mRNA comprising a first open reading frame encoding a polypeptide comprising an APOBEC3A deaminase (A3A) and an RNA-guided nickase, and a second mRNA comprising a second open reading frame encoding a uracil glycosylase inhibitor (UGI), wherein the second mRNA is different from the first mRNA.
[0800] Embodiment A10. An engineered cell comprising at least one base edit and/or indel, wherein the base edit and/or indel is made by contacting a cell with a composition comprising a first mRNA comprising a first open reading frame encoding a polypeptide comprising an APOBEC3A deaminase (A3A) and an RNA-guided nickase, and a second mRNA comprising a second open reading frame encoding a uracil glycosylase inhibitor (UGI), wherein the second mRNA is different from the first mRNA.
[0801] Embodiment A11. The mRNA, composition, method, cell, or engineered cell of any one of the preceding embodiments, wherein the A3A comprises an amino acid sequence with at least 87% identity to SEQ ID NO: 40.
[0802] Embodiment A12. The mRNA, composition, method, cell, or engineered cell of any one of the preceding embodiments, wherein the A3A comprises an amino acid sequence with at least 90% identity to SEQ ID NO: 40.
[0803] Embodiment A13. The mRNA, composition, method, cell, or engineered cell of any one of the preceding embodiments, wherein the A3A comprises an amino acid sequence with at least 95% identity to SEQ ID NO: 40.
[0804] Embodiment A14. The mRNA, composition, method, cell, or engineered cell of any one of the preceding embodiments, wherein the A3A comprises an amino acid sequence with at least 98% identity to SEQ ID NO: 40.
[0805] Embodiment A15. The mRNA, composition, method, cell, or engineered cell of any one of the preceding embodiments, wherein the A3A comprises an amino acid sequence with at least 99% identity to SEQ ID NO: 40.
[0806] Embodiment A16. The mRNA, composition, method, cell, or engineered cell of any one of the preceding embodiments, wherein the A3A comprises the amino acid sequence of SEQ ID NO: 40.
[0807] Embodiment A17. The mRNA, composition, method, cell, or engineered cell of any one of the preceding embodiments, wherein the A3A is a human A3A.
[0808] Embodiment A18. The mRNA, composition, method, cell, or engineered cell of any one of the preceding embodiments, wherein the A3A is a wild-type A3A.
[0809] Embodiment A19. The composition, method, cell, or engineered cell of any one of the preceding embodiments, wherein the UGI comprises an amino acid sequence with at least 80% identity to SEQ ID NO: 27.
[0810] Embodiment A20. The composition, method, cell, or engineered cell of any one of the preceding embodiments, wherein the UGI comprises an amino acid sequence with at least 90% identity to SEQ ID NO: 27.
[0811] Embodiment A21. The composition, method, cell, or engineered cell of any one of the preceding embodiments, wherein the UGI comprises an amino acid sequence with at least 95% identity to SEQ ID NO: 27.
[0812] Embodiment A22. The composition, method, cell, or engineered cell of any one of the preceding embodiments, wherein the UGI comprises an amino acid sequence with at least 98% identity to SEQ ID NO: 27.
[0813] Embodiment A23. The composition, method, cell, or engineered cell of any one of the preceding embodiments, wherein the UGI comprises an amino acid sequence with at least 99% identity to SEQ ID NO: 27.
[0814] Embodiment A24. The composition, method, cell, or engineered cell of any one of the preceding embodiments, wherein the UGI comprises the amino acid sequence of SEQ ID NO: 27.
[0815] Embodiment A25. The composition, method, or cell of any one of the preceding embodiments, further comprising at least one guide RNA (gRNA).
[0816] Embodiment A26. The composition, method, cell, or engineered cell of any one of the preceding embodiments, comprising a gRNA, wherein the gRNA is an sgRNA.
[0817] Embodiment A27. The composition, method, cell, or engineered cell of any one of the preceding embodiments, comprising a gRNA, wherein the gRNA is a dgRNA.
[0818] Embodiment A28. The composition, method, cell, or engineered cell of any one of the preceding embodiments, comprising a gRNA, wherein the gRNA is a short-single guide RNA (short-sgRNA) comprising a conserved portion of an sgRNA comprising a hairpin region, wherein the hairpin region lacks at least 5-10 nucleotides and wherein the short-sgRNA comprises a 5′ end modification and/or a 3′ end modification.
[0819] Embodiment A29. The mRNA, composition, method, cell, or engineered cell of any one of the preceding embodiments, wherein the RNA-guided nickase is a Cas nickase.
[0820] Embodiment A30. The mRNA, composition, method, cell, or engineered cell of any one of the preceding embodiments, wherein the RNA-guided nickase is a Class 2 Cas nickase.
[0821] Embodiment A31. The mRNA, composition, method, cell, or engineered cell of any one of the preceding embodiments, wherein the RNA-guided nickase is a Cas9 nickase.
[0822] Embodiment A32. The mRNA, composition, method, cell, or engineered cell of any one of the preceding embodiments, wherein the RNA-guided nickase is an S. pyogenes Cas9 nickase.
[0823] Embodiment A33. The mRNA, composition, method, cell, or engineered cell of any one of the preceding embodiments, wherein the RNA-guided nickase is a D10A SpyCas9 nickase.
[0824] Embodiment A34. The mRNA, composition, method, cell, or engineered cell of any one of the preceding embodiments, wherein the RNA-guided nickase is a N. meningitidis Cas9 nickase.
[0825] Embodiment A35. The mRNA, composition, method, cell, or engineered cell of any one of the preceding embodiments, wherein the RNA-guided nickase is a D16A Nme2 Cas9 nickase.
[0826] Embodiment A36. The mRNA, composition, method, cell, or engineered cell of any one of the preceding embodiments, wherein the RNA-guided nickase comprises an amino acid sequence having at least 80%, 90%, 95%, 98%, or 99% identity to any one of SEQ ID NOs: 70, 73, or 76.
[0827] Embodiment A37. The mRNA, composition, method, cell, or engineered cell of any one of the preceding embodiments, wherein the RNA-guided nickase comprises the amino acid sequence of any one of SEQ ID NOs: 70, 73, or 76.
[0828] Embodiment A38. The mRNA, composition, method, cell, or engineered cell of any one of the preceding embodiments, wherein the sequence encoding the RNA-guided nickase comprises a nucleotide sequence having at least 80%, 90%, 95%, 98%, or 99% identity to the nucleotide sequence of any one of SEQ ID NOs: 72, 75, or 78.
[0829] Embodiment A39. The mRNA, composition, method, cell, or engineered cell of any one of the preceding embodiments, wherein the sequence encoding the RNA-guided nickase comprises a nucleotide sequence having at least 90% to the nucleotide sequence of any one of SEQ ID NOs: 72, 75, or 78.
[0830] Embodiment A40. The mRNA, composition, method, cell, or engineered cell of any one of the preceding embodiments, wherein the sequence encoding the RNA-guided nickase comprises a nucleotide sequence having at least 95% to the nucleotide sequence of any one of SEQ ID NOs: 72, 75, or 78.
[0831] Embodiment A41. The mRNA, composition, method, cell, or engineered cell of any one of the preceding embodiments, wherein the sequence encoding the RNA-guided nickase comprises a nucleotide sequence having at least 98% to the nucleotide sequence of any one of SEQ ID NOs: 72, 75, or 78.
[0832] Embodiment A42. The mRNA, composition, method, cell, or engineered cell of any one of the preceding embodiments, wherein the sequence encoding the RNA-guided nickase comprises a nucleotide sequence having at least 99% to the nucleotide sequence of any one of SEQ ID NOs: 72, 75, or 78.
[0833] Embodiment A43. The mRNA, composition, method, cell, or engineered cell of any one of the preceding embodiments, wherein the sequence encoding the RNA-guided nickase comprises the nucleotide sequence of any one of SEQ ID NOs: 71, 72, 74, 75, or 77-90.
[0834] Embodiment A44. The mRNA, composition, method, cell, or engineered cell of any one of the preceding embodiments, wherein the mRNA comprises a 5′ UTR with at least 90% identity to any one of SEQ ID NOs: 91-98.
[0835] Embodiment A45. The mRNA, composition, method, cell, or engineered cell of any one of the preceding embodiments, wherein the mRNA comprises a 3′ UTR with at least 90% identity to any one of SEQ ID NOs: 99-106.
[0836] Embodiment A46. The mRNA, composition, method, cell, or engineered cell of any one of the preceding embodiments, wherein the mRNA comprises a 5′ UTR and a 3′ UTR from the same source.
[0837] Embodiment A47. The mRNA, composition, method, cell, or engineered cell of any one of the preceding embodiments, wherein the mRNA comprises a 5′ cap selected from Cap0, Cap1, and Cap2.
[0838] Embodiment A48. The mRNA, composition, method, cell, or engineered cell of any one of the preceding embodiments, wherein the open reading frame encoding a polypeptide comprising an APOBEC3A deaminase (A3A) and an RNA-guided nickase, and/or the open reading frame encoding a uracil glycosylase inhibitor (UGI) comprise minimal adenine codons and/or minimal uridine codons.
[0839] Embodiment A49. The mRNA, composition, method, cell, or engineered cell of any one of the preceding embodiments, wherein the open reading frame encoding a polypeptide comprising an APOBEC3A deaminase (A3A) and an RNA-guided nickase, and/or the open reading frame encoding a uracil glycosylase inhibitor (UGI) comprise minimal adenine codons.
[0840] Embodiment A50. The mRNA, composition, method, cell, or engineered cell of any one of the preceding embodiments, wherein the open reading frame encoding a polypeptide comprising an APOBEC3A deaminase (A3A) and an RNA-guided nickase, and/or the open reading frame encoding a uracil glycosylase inhibitor (UGI) have codons that increase translation of the mRNA in a mammal.
[0841] Embodiment A51. The mRNA, composition, method, cell, or engineered cell of any one of the preceding embodiments, wherein the open reading frame encoding a polypeptide comprising an APOBEC3A deaminase (A3A) and an RNA-guided nickase, and/or the open reading frame encoding a uracil glycosylase inhibitor (UGI) have codons that increase translation of the mRNA in a mammal, wherein the mammal is a human.
[0842] Embodiment A52. The mRNA, composition, method, cell, or engineered cell of any one of the preceding embodiments, wherein the A3A is located N-terminal to the RNA-guided nickase in the polypeptide.
[0843] Embodiment A53. The mRNA, composition, method, cell, or engineered cell of any one of the preceding embodiments, wherein the encoded RNA-guided nickase comprises a nuclear localization signal (NLS).
[0844] Embodiment A54. The mRNA, composition, method, cell, or engineered cell of any one of the preceding embodiments, wherein the encoded RNA-guided nickase comprises a nuclear localization signal (NLS), and wherein the NLS is at the C-terminus of the RNA-guided nickase.
[0845] Embodiment A55. The mRNA, composition, method, cell, or engineered cell of any one of the preceding embodiments, wherein the encoded RNA-guided nickase comprises a nuclear localization signal (NLS), and wherein the NLS is at the N-terminus of the RNA-guided nickase, or wherein an NLS is fused to both the N-terminus and C-terminus of the RNA-guided nickase.
[0846] Embodiment A56. The mRNA, composition, method, cell, or engineered cell of any one of the preceding embodiments, wherein the encoded RNA-guided nickase comprises a nuclear localization signal (NLS), and wherein a linker is present between the N-terminus of the RNA-guided nickase and the NLS, optionally wherein the linker is a peptide linker.
[0847] Embodiment A57. The mRNA, composition, method, cell, or engineered cell of any one of the preceding embodiments, wherein the encoded RNA-guided nickase comprises a nuclear localization signal (NLS), and wherein the NLS comprises a sequence having at least 80%, 85%, 90%, or 95% identity to any one of SEQ ID NOs: 63 and 110-122.
[0848] Embodiment A58. The mRNA, composition, method, cell, or engineered cell of any one of the preceding embodiments, wherein the encoded RNA-guided nickase comprises a nuclear localization signal (NLS), and wherein the NLS comprises the sequence of any one of SEQ ID NOs: 63 and 110-122.
[0849] Embodiment A59. The mRNA, composition, method, cell, or engineered cell of any one of the preceding embodiments, wherein the encoded RNA-guided nickase comprises a nuclear localization signal (NLS), and wherein the NLS is encoded by a sequence having at least 80%, 85%, 90%, 95%, 98% or 100% identity to the sequence of any one of SEQ ID NOs: 123-135.
[0850] Embodiment A60. The mRNA, composition, method, cell, or engineered cell of any one of the preceding embodiments, wherein the encoded RNA-guided nickase comprises a nuclear localization signal (NLS), and wherein the A3A is located N-terminal to the NLS in the polypeptide.
[0851] Embodiment A61. The mRNA, composition, method, cell, or engineered cell of any one of the preceding embodiments, wherein the encoded RNA-guided nickase comprises a nuclear localization signal (NLS), and wherein the RNA-guided nickase is located N-terminal to the NLS in the polypeptide.
[0852] Embodiment A62. The mRNA, composition, method, cell, or engineered cell of any one of the preceding embodiments, wherein the open reading frame encoding a polypeptide comprising an APOBEC3A deaminase (A3A) and an RNA-guided nickase comprises a sequence having at least 80%, 85%, 90%, 95%, 98% or 100% identity to the sequence of SEQ ID NO:1.
[0853] Embodiment A63. The mRNA, composition, method, cell, or engineered cell of any one of the preceding embodiments, wherein the open reading frame encoding a polypeptide comprising an APOBEC3A deaminase (A3A) and an RNA-guided nickase comprises a sequence having at least 80%, 85%, 90%, 95%, 98% or 100% identity to the sequence of SEQ ID NO: 4.
[0854] Embodiment A64. The mRNA, composition, method, cell, or engineered cell of any one of the preceding embodiments, wherein at least 10% of the uridine in the mRNA is substituted with a modified uridine.
[0855] Embodiment A65. The mRNA, composition, method, cell or engineered cell of embodiment A64, wherein the modified uridine is one or more of N1-methyl-pseudouridine, pseudouridine, 5-methoxyuridine, or 5-iodouridine.
[0856] Embodiment A66. The mRNA, composition, method, cell, or engineered cell of embodiment A64 or A65, wherein the modified uridine is one or both of N1-methyl-pseudouridine or 5-methoxyuridine.
[0857] Embodiment A67. The mRNA, composition, method, cell, or engineered cell of any one of embodiments A64-A66, wherein the modified uridine is N1-methyl-pseudouridine.
[0858] Embodiment A68. The mRNA, composition, method, cell, or engineered cell of any one of embodiments A64-A66, wherein the modified uridine is 5-methoxyuridine.
[0859] Embodiment A69. The mRNA, composition, method, cell, or engineered cell of any one of embodiments A64-A68, wherein 15% to 45% of the uridine is substituted with the modified uridine.
[0860] Embodiment A70. The mRNA, composition, method, cell, or engineered cell of any one of embodiments A64-A69, wherein at least 20% or at least 30% of the uridine is substituted with the modified uridine.
[0861] Embodiment A71. The mRNA, composition, method, cell, or engineered cell of any one of embodiments A64-A70, wherein at least 80% or at least 90% of the uridine is substituted with the modified uridine.
[0862] Embodiment A72. The mRNA, composition, method, cell, or engineered cell of any one of embodiments A64-A71, wherein 100% uridine is substituted with the modified uridine.
[0863] Embodiment A73. The mRNA, composition, method, or cell of any one of the preceding embodiments, further encoding a peptide linker between the A3A and RNA-guided nickase, optionally wherein the peptide linker is XTEN.
[0864] Embodiment A74. The mRNA, composition, method, or cell of any one of the preceding embodiments, further encoding a peptide linker between the A3A and RNA-guided nickase, wherein the peptide linker comprises at least 1, at least 2, at least 3, at least 4, at least 5, at least 6, at least 7, at least 8, at least 9, at least 10, at least 15, at least 20, at least 25, at least 30, at least 40, at least 50, or more amino acids.
[0865] Embodiment A75. The mRNA, composition, method, or cell of any one of the preceding embodiments, further encoding a peptide linker between the A3A and RNA-guided nickase, wherein the peptide linker comprises one or more sequences selected from SEQ ID NOs: 46-59 and 211-267.
[0866] Embodiment A76. A polypeptide encoded by the mRNA of any one of the preceding embodiments A.
[0867] Embodiment A77. A vector comprising the mRNA of any one of the preceding embodiments A.
[0868] Embodiment A78. An expression construct comprising a promoter operably linked to a sequence encoding the mRNA of any one of the preceding embodiments A.
[0869] Embodiment A79. A plasmid comprising the expression construct of embodiment A78.
[0870] Embodiment A80. A host cell comprising the vector of embodiment A77, the expression construct of embodiment A78, or the plasmid of embodiment A79.
[0871] Embodiment A81. The mRNA or composition of any one of the preceding embodiments, wherein the mRNA or composition is formulated as a lipid nucleic acid assembly composition, optionally a lipid nanoparticle.
[0872] Embodiment A82. Use of the mRNA or composition according to any one of the preceding embodiments for modifying a target gene in a cell.
[0873] Embodiment A83. Use of the mRNA or composition according to any one of the preceding embodiments for the manufacture of a medicament for modifying a target gene in a cell.
[0874] Embodiment A84. A method of modifying a target gene in a cell, comprising delivering to the cell one or more lipid nucleic acid assembly compositions, optionally lipid nanoparticles, comprising:
   [0875] (a) a first mRNA comprising a first open reading frame encoding a polypeptide comprising an APOBEC3A deaminase (A3A) and an RNA-guided nickase;
   [0876] (b) a second mRNA comprising a second open reading frame encoding a uracil glycosylase inhibitor (UGI); and
   [0877] (c) one or more guide RNAs.
[0878] Embodiment A85. The method of embodiment A84, wherein parts (a) and (b) are in separate lipid nucleic acid assembly compositions.
[0879] Embodiment A86. The method of embodiment A84, wherein parts (a) and (b) are in the same lipid nucleic acid assembly composition.
[0880] Embodiment A87. The method of embodiment A84, wherein parts (a) and (c) are in separate lipid nucleic acid assembly compositions.
[0881] Embodiment A88. The method of embodiment A84, wherein parts (a) and (c) are in the same lipid nucleic acid assembly composition.
[0882] Embodiment A89. The method of embodiment A84, wherein parts (b) and (c) are in separate lipid nucleic acid assembly compositions.
[0883] Embodiment A90. The method of embodiment A84, wherein parts (a) and (c) are in the same lipid nucleic acid assembly composition, and part (b) is in a separate lipid nucleic acid assembly composition.
[0884] Embodiment A91. The method of embodiment A84, wherein parts (a), (b), and (c) are each in separate lipid nucleic acid assembly compositions.
[0885] Embodiment A92. The method of embodiment A84, wherein parts (a), (b), and (c) are in the same lipid nucleic acid assembly composition.
[0886] Embodiment A93. The method of any one of embodiments A84-A88, A90, and A92, wherein the one or more guide RNAs are each in separate lipid nucleic acid assembly compositions.
[0887] Embodiment A94. The method of any one of embodiments A84-A93, comprising delivering to the cell a lipid nucleic acid assembly composition comprising a first mRNA comprising a first open reading frame encoding a polypeptide comprising an APOBEC3A deaminase (A3A) and an RNA-guided nickase and a second mRNA comprising a second open reading frame encoding a uracil glycosylase inhibitor (UGI) in the same lipid nucleic acid assembly composition.
[0888] Embodiment A95. The method of any one of embodiments A84-A93, comprising delivering to the cell a first lipid nucleic acid assembly composition comprising a first mRNA comprising a first open reading frame encoding a polypeptide comprising an APOBEC3A deaminase (A3A) and an RNA-guided nickase, and a second lipid nucleic acid assembly composition comprising a second mRNA comprising a second open reading frame encoding a uracil glycosylase inhibitor (UGI).
[0889] Embodiment A96. The method of any one of embodiments A84-A95, further comprising delivering one or more guide RNAs in one or more lipid nucleic acid assembly compositions that are separate from the lipid nucleic acid assembly compositions comprising the A3A and UGI.
[0890] Embodiment A97. The method of any one of embodiments A84-A96, wherein at least 2, 3, 4, 5, 6, 7, 8, 9, or 10 lipid nucleic acid assembly compositions are delivered to the cell.
[0891] Embodiment A98. The method of any one of embodiments A84-A97, wherein at least one lipid nucleic acid assembly composition comprises lipid nanoparticle (LNPs), optionally wherein all lipid nucleic acid assembly compositions comprise LNPs.
[0892] Embodiment A99. The method of any one of embodiments A84-A98, wherein at least one lipid nucleic acid assembly composition is a lipoplex composition.
[0893] Embodiment A100. The method of any one of embodiments A84-A99, wherein the lipid nucleic acid assembly composition comprises an ionizable lipid.
[0894] Embodiment A101. The method of any one of embodiments A84-A100, wherein the lipid nucleic acid assembly composition comprises an ionizable lipid and wherein the ionizable lipid comprises a biodegradable ionizable lipid.
[0895] Embodiment A102. The method of any one of embodiments A84-A101, wherein the lipid nucleic acid assembly composition comprises an ionizable lipid and wherein the ionizable lipid has a PK value in the range of pKa in the range of from about 5.1 to about 7.4, such as from about 5.5 to about 6.6, from about 5.6 to about 6.4, from about 5.8 to about 6.2, or from about 5.8 to about 6.5.
[0896] Embodiment A103. The method of any one of embodiments A84-A102, wherein the lipid nucleic acid assembly composition comprises an amine lipid.
[0897] Embodiment A104. The method of any one of embodiments A84-A103, wherein the lipid nucleic acid assembly composition comprises Lipid A.
[0898] Embodiment A105. The method of any one of embodiments A84-A104, wherein the lipid nucleic acid assembly composition comprises a helper lipid.
[0899] Embodiment A106. The method of any one of embodiments A84-A105, wherein the lipid nucleic acid assembly composition comprises a helper lipid, wherein the helper lipid is cholesterol.
[0900] Embodiment A107. The method of any one of embodiments A84-A106, wherein the lipid nucleic acid assembly composition comprises a stealth lipid.
[0901] Embodiment A108. The method of any one of embodiments A84-A107, wherein the lipid nucleic acid assembly composition comprises a stealth lipid, wherein the stealth lipid is PEG2k-DMG.
[0902] Embodiment A109. The method of any one of embodiments A84-A108, wherein the lipid nucleic acid assembly composition comprises a neutral lipid.
[0903] Embodiment A110. The method of any one of embodiments A84-A109, wherein the lipid nucleic acid assembly composition comprises a neutral lipid, wherein the neutral lipid is DSPC.
[0904] Embodiment A111. The method of any one of embodiments A84-A110, wherein the lipid nucleic acid assembly composition comprises a neutral lipid, wherein the neutral lipid is present at about 9 mol-%.
[0905] Embodiment A112. The method of any one of embodiments A84-A111, wherein the lipid nucleic acid assembly composition comprises a stealth lipid, wherein the stealth lipid is present at about 3 mol-%.
[0906] Embodiment A113. The method of any one of embodiments A84-A112, wherein the lipid nucleic acid assembly composition comprises a helper lipid, wherein the helper lipid is present at about 38 mol-%.
[0907] Embodiment A114. The method of any one of embodiments A84-A113, wherein the N/P ratio of the lipid nucleic acid assembly composition is about 6.
[0908] Embodiment A115. The method of any one of embodiments A84-A114, wherein the lipid nucleic acid assembly composition comprises about 50 mol-% amine lipid such as Lipid A; about 9 mol-% neutral lipid such as DSPC; about 3 mol-% of stealth lipid such as a PEG lipid, such as PEG2k-DMG, and the remainder of the lipid component is helper lipid such as cholesterol wherein the N/P ratio of the is about 6.
[0909] Embodiment A116. The method of any one of embodiments A84-A115, comprising one gRNA that targets a gene that reduces or eliminates MHC class I expression on the surface of a cell, and/or one gRNA that targets a gene that reduces or eliminates MHC class II expression on the surface of a cell, and/or one gRNA that targets a gene that reduces or eliminates endogenous TCR expression.
[0910] Embodiment A117. The method of any one of embodiments A84-A115, comprising at least two gRNAs selected from: one gRNA that targets a gene that reduces or eliminates MHC class I expression on the surface of a cell, one gRNA that targets a gene that reduces or eliminates MHC class II expression on the surface of a cell, and one gRNA that targets a gene that reduces or eliminates endogenous TCR expression.
[0911] Embodiment A118. The method of any one of embodiments A84-A115, comprising one gRNA that targets a gene that reduces or eliminates MHC class I expression on the surface of a cell, one gRNA that targets a gene that reduces or eliminates MHC class II expression on the surface of a cell, and one gRNA that targets a gene that reduces or eliminates endogenous TCR expression.
[0912] Embodiment A119. The method of any one of embodiments A84-A115, comprising one gRNA selected from a gRNA that targets TRAC, TRBC, B2M, HLA-A, or CIITA.
[0913] Embodiment A120. The method of any one of embodiments A84-A116, and A119, wherein the gRNA targets TRBC, wherein the gRNA comprises a guide sequence chosen from: i) SEQ ID NOs: 706-721; ii) at least 17, 18, 19, or 20 contiguous nucleotides of a sequence selected from SEQ ID NOs: 706-721; iii) a guide sequence at least 95%, 90%, or 85% identical to a sequence selected from SEQ ID NOs: 706-721; iv) a sequence that comprises 10 contiguous nucleotides±10 nucleotides of a genomic coordinate listed in Table 5A; v) at least 17, 18, 19, or 20 contiguous nucleotides of a sequence from (iv); or vi) a guide sequence that is at least 95%, 90%, or 85% identical to a sequence selected from (v).
[0914] Embodiment A121. The method of any one of embodiments A84-A116, and A119, wherein the gRNA targets TRBC, wherein the gRNA comprises a guide sequence chosen from: i) SEQ ID NOs: 618-669; ii) at least 17, 18, 19, or 20 contiguous nucleotides of a sequence selected from SEQ ID NOs: 618-669; iii) a guide sequence at least 95%, 90%, or 85% identical to a sequence selected from SEQ ID NOs: 618-669; iv) a sequence that comprises 10 contiguous nucleotides±10 nucleotides of a genomic coordinate listed in Table 5B; v) at least 17, 18, 19, or 20 contiguous nucleotides of a sequence from (iv); or vi) a guide sequence that is at least 95%, 90%, or 85% identical to a sequence selected from (v).
[0915] Embodiment A122. The method of any one of embodiments A84-A115, comprising at least two gRNAs selected from a gRNA that targets TRAC, TRBC, or B2M, wherein the two guide RNAs do not target the same gene.
[0916] Embodiment A123. The method of any one of embodiments A84-A115, comprising at least two gRNAs selected from a gRNA that targets TRAC, TRBC, or HLA-A, wherein the two guide RNAs do not target the same gene.
[0917] Embodiment A124. The method of any one of embodiments A84-A115, comprising one guide RNA that targets TRAC, and one gRNA that targets TRBC.
[0918] Embodiment A125. The method of any one of embodiments A84-A115, comprising one guide RNA that targets B2M, and one gRNA that targets CIITA.
[0919] Embodiment A126. The method of any one of embodiments A84-A115, comprising one guide RNA that targets HLA-A, and one gRNA that targets CIITA, optionally wherein the cell is homozygous for HLA-B and homozygous for HLA-C.
[0920] Embodiment A127. The method of any one of embodiments A84-A115, comprising one guide RNA that targets TRAC, and one gRNA that targets TRBC, and one gRNA that targets B2M.
[0921] Embodiment A128. The method of any one of embodiments A84-A115, comprising one guide RNA that targets TRAC, and one gRNA that targets TRBC, and one gRNA that targets HLA-A, optionally wherein the cell is homozygous for HLA-B and homozygous for HLA-C.
[0922] Embodiment A129. The method of any one of embodiments A84-A115, comprising one guide RNA that targets TRAC, and one gRNA that targets TRBC, one gRNA that targets B2M, and one gRNA that targets CIITA.
[0923] Embodiment A130. The method of any one of embodiments A84-A115, comprising one guide RNA that targets TRAC, and one gRNA that targets TRBC, one gRNA that targets HLA-A, and one gRNA that targets CIITA, optionally wherein the cell is homozygous for HLA-B and homozygous for HLA-C.
[0924] Embodiment A131. The method of any one of the preceding embodiments, wherein the method generates a cytosine (C) to thymine (T) conversion within a target sequence.
[0925] Embodiment A132. The method of any one of the preceding embodiments, wherein the method causes at least 60% C-to-T conversion relative to the total edits in the target sequence.
[0926] Embodiment A133. The method of any one of the preceding embodiments, wherein the method causes at least 65%, 70%, 75%, 80%, 85%, 90%, 95%, 98%, or 99% C-to-T conversion relative to the total edits in the target sequence.
[0927] Embodiment A134. The method of any one of the preceding embodiments, wherein the ratio of C-to-T conversion to unintended edits is larger than 1:1.
[0928] Embodiment A135. The method of any one of the preceding embodiments, wherein the ratio of C-to-T conversion to unintended edits is from 2:1 to 99:1.
[0929] Embodiment A136. The method of any one of the preceding embodiments, wherein the ratio of C-to-T conversion to unintended edits is 2:1, 3:1, 4:1, 5:1, 6:1, 7:1, or 8:1.
[0930] Embodiment A137. The method of any one of the preceding embodiments, wherein the method causes the A3A to make a base edit corresponding to any one of positions −1 to 10 relative to the 5′ end of the guide sequence.
[0931] Embodiment A138. The method of any one of the preceding embodiments, wherein the method causes the A3A to make a base edit at a position 1, 2, 3, 4, 5, 6, 7, 8, 9, or 10 nucleotides from the 5′ end of the guide sequence.
[0932] Embodiment A139. The method of any one of the preceding embodiments, wherein the first mRNA, the second mRNA, and the guide RNA if present, delivered at a ratio of about 6:2:3 (w:w:w).
[0933] Embodiment A140. The method of any one of the preceding embodiments, wherein the mRNA, composition, or LNP is administered at a total RNA amount from 5 to 600 ng.
[0934] Embodiment A141. The method of any one of the preceding embodiments, wherein the total RNA amount is from 8 to 550 ng.
[0935] Embodiment A142. The method of any one of the preceding embodiments, wherein the total RNA amount is from 35 to 550 ng.
[0936] Embodiment A143. The method of any one of the preceding embodiments, wherein the total RNA amount is from 70 to 550 ng.
[0937] Embodiment A144. The method of any one of the preceding embodiments, wherein the total RNA amount is from 138 to 550 ng.
[0938] Embodiment A145. The method of any one of the preceding embodiments, wherein the total RNA amount is from 275 to 550 ng.
[0939] Embodiment A146. The method, cell, or engineered cell of any one of the preceding embodiments, wherein the cell is a lymphocyte.
[0940] Embodiment A147. The method, cell, or engineered cell of any one of the preceding embodiments, wherein the cell is a B lymphocyte.
[0941] Embodiment A148. The method, cell, or engineered cell of any one of the preceding embodiments, wherein the cell is a T lymphocyte.
[0942] Embodiment A149. The method or use of any one of the preceding embodiments, wherein the modification of the target gene is in vivo.
[0943] Embodiment A150. The method or use of any one of the preceding embodiments, wherein the modification of the target gene is ex vivo.
[0944] Embodiment A151. The method or use of any one of the preceding embodiments, wherein the modification of the target gene reduces or eliminates expression of the target gene.
[0945] Embodiment A152. The method or use of any one of the preceding embodiments, wherein the genome editing or modification of the target gene reduces expression of the target gene by at least 50%, 55%, 60%, 65%, 70%, 75%, 80%, 85%, 90%, or 95%.
[0946] Embodiment A153. The method or use of any one of the preceding embodiments, wherein the genome editing or modification of the target gene produces a missense mutation in the gene.
[0947] Embodiment A154. A polypeptide comprising an APOBEC3A deaminase (A3A) and an RNA-guided nickase, wherein the polypeptide does not comprise a uracil glycosylase inhibitor (UGI).
[0948] Embodiment A155. A composition comprising a first polypeptide comprising an APOBEC3A deaminase (A3A) and an RNA-guided nickase and a second polypeptide comprising a UGI, wherein the second polypeptide is different from the first polypeptide.
[0949] Embodiment A156. The polypeptide of embodiment A152 or A153, wherein the A3A is fused to the RNA-guided nickase via a peptide linker, optionally XTEN.
[0950] Embodiment A157. The polypeptide of embodiment A152 or A153, wherein the A3A is attached to a linker comprising an organic molecule, polymer, or chemical moiety.
[0951] Embodiment A158. A pharmaceutical composition comprising the mRNA, composition, or polypeptide of any of the preceding embodiments Aand a pharmaceutically acceptable carrier.
[0952] Embodiment A159. A kit comprising the mRNA, composition, or polypeptide of any of the preceding embodiments A.
[0953] Embodiment A160. The mRNA, composition, method, cell, or engineered cell of any one of the preceding embodiments, wherein the polypeptide comprising an APOBEC3A deaminase (A3A) and an RNA-guided nickase includes: the A3A, a linker, and the RNA-guided nickase in amino to carboxy terminal order.
[0954] Embodiment A161. A method of altering a DNA sequence within a TRAC gene, comprising delivering to a cell:
   [0955] (a) a gRNA comprising a guide sequence chosen from: i) SEQ ID NOs: 706-721; ii) at least 17, 18, 19, or 20 contiguous nucleotides of a sequence selected from SEQ ID NOs: 706-721; iii) a guide sequence at least 95%, 90%, or 85% identical to a sequence selected from SEQ ID NOs: 706-721; iv) a sequence that comprises 10 contiguous nucleotides±10 nucleotides of a genomic coordinate listed in Table 5A; v) at least 17, 18, 19, or 20 contiguous nucleotides of a sequence from (iv); or vi) a guide sequence that is at least 95%, 90%, or 85% identical to a sequence selected from (v); or
   [0956] (b) a nucleic acid encoding a gRNA of (a.).
[0957] Embodiment A162. A method of reducing the expression of a TRAC gene, comprising delivering to a cell:
   [0958] (a) a gRNA comprising a guide sequence chosen from: i) SEQ ID NOs: 706-721; ii) at least 17, 18, 19, or 20 contiguous nucleotides of a sequence selected from SEQ ID NOs: 706-721; iii) a guide sequence at least 95%, 90%, or 85% identical to a sequence selected from SEQ ID NOs: 706-721; iv) a sequence that comprises 10 contiguous nucleotides±10 nucleotides of a genomic coordinate listed in Table 5A; v) at least 17, 18, 19, or 20 contiguous nucleotides of a sequence from (iv); or vi) a guide sequence that is at least 95%, 90%, or 85% identical to a sequence selected from (v); or
   [0959] (b) a nucleic acid encoding a gRNA of (a.).
[0960] Embodiment A163. A method of immunotherapy comprising administering a composition comprising an engineered cell to a subject,
   [0961] wherein the cell comprises a genomic modification of at least one nucleotide within the genomic coordinates selected from:
   [0962] chr14: 22547596-22547616; chr14: 22550570-22550590; chr14: 22547763-22547783; chr14: 22550596-22550616; chr14: 22550566-22550586; chr14: 22547753-22547773; chr14: 22550601-22550621; chr14: 22550599-22550619; chr14: 22547583-22547603; chr14: 22547671-22547691; chr14: 22547770-22547790; chr14: 22547676-225476%; chr14: 22547772-22547792; chr14: 22547771-22547791; chr14: 22547733-22547753; chr14: 22547776-225477%; or
   [0963] wherein the cell is engineered by delivering to the cell:
      [0964] (a) a gRNA comprising a guide sequence chosen from: i) SEQ ID NOs: 706-721; ii) at least 17, 18, 19, or 20 contiguous nucleotides of a sequence selected from SEQ ID NOs: 706-721; iii) a guide sequence at least 95%, 90%, or 85% identical to a sequence selected from SEQ ID NOs: 706-721; iv) a sequence that comprises 10 contiguous nucleotides±10 nucleotides of a genomic coordinate listed in Table 5A; v) at least 17, 18, 19, or 20 contiguous nucleotides of a sequence from (iv); or vi) a guide sequence that is at least 95%, 90%, or 85% identical to a sequence selected from (v); or
      [0965] (b) a nucleic acid encoding a gRNA of (a.).
[0966] Embodiment A164. The method of any one of embodiments A161-163, wherein the guide sequence comprises any one of SEQ ID NOs: 706-709.
[0967] Embodiment A165. The method of any one of embodiments A161-164, wherein the guide sequence comprises any one of SEQ ID NOs: 706-708.
[0968] Embodiment A166. The method of any one of embodiments A161-165, wherein the guide sequence comprises SEQ ID NO: 706.
[0969] Embodiment A167. The method of any one of embodiments A161-165, wherein the guide sequence comprises SEQ ID NO: 707.
[0970] Embodiment A168. The method of any one of embodiments A161-165, wherein the guide sequence comprises SEQ ID NO: 708.
[0971] Embodiment A169. A method of altering a DNA sequence within a TRBC1 and/or TRBC2 gene, comprising delivering a composition to a cell, wherein the composition comprises:
   [0972] (a) a gRNA comprising a guide sequence chosen from: i) SEQ ID NOs: 618-669; ii) at least 17, 18, 19, or 20 contiguous nucleotides of a sequence selected from SEQ ID NOs: 618-669; iii) a guide sequence at least 95%, 90%, or 85% identical to a sequence selected from SEQ ID NOs: 618-669; iv) a sequence that comprises 10 contiguous nucleotides±10 nucleotides of a genomic coordinate listed in Table 5B; v) at least 17, 18, 19, or 20 contiguous nucleotides of a sequence from (iv); or vi) a guide sequence that is at least 95%, 90%, or 85% identical to a sequence selected from (v); or
   [0973] (b) a nucleic acid encoding a guide RNA of (a.).
[0974] Embodiment A170. A method of reducing the expression of a TRBC1 and/or TRBC2 gene, comprising delivering a composition to a cell, wherein the composition comprises:
   [0975] (a) a gRNA comprising a guide sequence chosen from: i) SEQ ID NOs: 618-669; ii) at least 17, 18, 19, or 20 contiguous nucleotides of a sequence selected from SEQ ID NOs: 618-669; iii) a guide sequence at least 95%, 90%, or 85% identical to a sequence selected from SEQ ID NOs: 618-669; iv) a sequence that comprises 10 contiguous nucleotides±10 nucleotides of a genomic coordinate listed in Table 5B; v) at least 17, 18, 19, or 20 contiguous nucleotides of a sequence from (iv); or vi) a guide sequence that is at least 95%, 90%, or 85% identical to a sequence selected from (v); or
   [0976] (b) a nucleic acid encoding a guide RNA of (a.).
[0977] Embodiment A171. A method of immunotherapy comprising administering a composition comprising an engineered cell to a subject,
   [0978] wherein the cell comprises a modification of at least one nucleotide within the genomic coordinates selected from: chr7: 142791757-142791777; chr7: 142801104-142801124; chr7: 142791811-142791831; chr7: 142801158-142801178; chr7: 142792728-142792748; chr7: 142791719-142791739; chr7: 142791766-142791786; chr7: 142801113-142801133; chr7: 142791928-142791948; chr7: 142801275-142801295; chr7: 142792062-142792082; chr7: 142801409-142801429; chr7: 142792713-142792733; chr7: 142802126-142802146; chr7: 142791808-142791828; chr7: 142801155-142801175; chr7: 142792003-142792023; chr7: 142801350-142801370; chr7: 142791760-142791780; chr7: 142791715-142791735; chr7: 142792781-142792801; chr7: 142792040-142792060; chr7: 142801387-142801407; chr7: 142791862-142791882; chr7: 142791716-142791736; chr7: 142791787-142791807; chr7: 142791759-142791779; chr7: 142801106-142801126; chr7: 142791807-142791827; chr7: 142801154-142801174; chr7: 142791879-142791899; chr7: 142801226-142801246; chr7: 142791805-142791825; chr7: 142791700-142791720; chr7: 142791765-142791785; chr7: 142801112-142801132; chr7: 142791820-142791840; chr7: 142791872-142791892; chr7: 142801219-142801239; chr7: 142791700-142791720; chr7: 142791806-142791826; chr7: 142801153-142801173; chr7: 142792035-142792055; chr7: 142792724-142792744; chr7: 142792754-142792774; chr7: 142791804-142791824; chr7: 142792684-142792704; chr7: 142791823-142791843; chr7: 142792728-142792748; chr7: 142792721-142792741; chr7: 142792749-142792769; chr7: 142792685-142792705; chr7: 142791816-142791836; chr7: 142801163-142801183; chr7: 142792686-142792706; chr7: 142791793-142791813; chr7: 142793110-142793130; chr7: 142791815-142791835; chr7: 142801162-142801182; chr7: 142792770-142792790; chr7: 142792047-142792067; chr7: 142801394-142801414; chr7: 142791871-142791891; chr7: 142801218-142801238; chr7: 142791894-142791914; chr7: 142792723-142792743; chr7: 142792724-142792744; chr7: 142791897-142791917; chr7: 142801244-142801264; chr7: 142792757-142792777; chr7: 142792740-142792760; chr7: 142792758-142792778; or
   [0979] wherein the cell is engineered by delivering to a cell:
      [0980] (a) a gRNA comprising a guide sequence chosen from: i) SEQ ID NOs: 618-669; ii) at least 17, 18, 19, or 20 contiguous nucleotides of a sequence selected from SEQ ID NOs: 618-669; iii) a guide sequence at least 95%, 90%, or 85% identical to a sequence selected from SEQ ID NOs: 618-669; iv) a sequence that comprises 10 contiguous nucleotides±10 nucleotides of a genomic coordinate listed in Table 5B; v) at least 17, 18, 19, or 20 contiguous nucleotides of a sequence from (iv); or vi) a guide sequence that is at least 95%, 90%, or 85% identical to a sequence selected from (v); or
      [0981] (b) a nucleic acid encoding a guide RNA of (a.).
[0982] Embodiment A172. The method of any one of embodiments A169-171, wherein the guide sequence comprises any one of SEQ ID NOs: 618-627.
[0983] Embodiment A173. The method of any one of embodiments A169-172, wherein the guide sequence comprises any one of SEQ ID NOs: 618-621.
[0984] Embodiment A174. The method of any one of embodiments A169-173, wherein the guide sequence comprises SEQ ID NO: 618.
[0985] Embodiment A175. The method of any one of embodiments A169-173, wherein the guide sequence comprises SEQ ID NO: 619.
[0986] Embodiment A176. The method of any one of embodiments A169-173, wherein the guide sequence comprises SEQ ID NO: 620.
[0987] Embodiment A177. The method of any one of embodiments A169-173, wherein the guide sequence comprises SEQ ID NO: 621.
[0988] Embodiment A178. The method of any one of embodiments A161-177, wherein the composition further comprises the mRNA or composition of any one of embodiments A1-76.
[0989] Embodiment A179. A composition comprising:
   [0990] (a) a gRNA comprising a guide sequence chosen from: i) SEQ ID NOs: 706-721; ii) at least 17, 18, 19, or 20 contiguous nucleotides of a sequence selected from SEQ ID NOs: 706-721; iii) a guide sequence at least 95%, 90%, or 85% identical to a sequence selected from SEQ ID NOs: 706-721; iv) a sequence that comprises 10 contiguous nucleotides±10 nucleotides of a genomic coordinate listed in Table 5A; v) at least 17, 18, 19, or 20 contiguous nucleotides of a sequence from (iv); or vi) a guide sequence that is at least 95%, 90%, or 85% identical to a sequence selected from (v); and optionally
   [0991] (b) the mRNA or composition of any one of embodiments A1-A76.
[0992] Embodiment A180. The composition of embodiment A179, wherein the guide sequence comprises any one of SEQ ID NOs: 706-709.
[0993] Embodiment A181. The composition of embodiment A179 or A180, for use in altering a DNA sequence within the TRAC gene in a cell.
[0994] Embodiment A182. The composition of any one of embodiments A179-A181 for use in reducing the expression of the TRAC gene in a cell.
[0995] Embodiment A183. The composition of any one of embodiments A179-A182, for use in immunotherapy of a subject.
[0996] Embodiment A184. A composition comprising:
   [0997] (a) a gRNA comprising a guide sequence chosen from: i) SEQ ID NOs: 618-669; ii) at least 17, 18, 19, or 20 contiguous nucleotides of a sequence selected from SEQ ID NOs: 618-669; iii) a guide sequence at least 95%, 90%, or 85% identical to a sequence selected from SEQ ID NOs: 618-669; iv) a sequence that comprises 10 contiguous nucleotides±10 nucleotides of a genomic coordinate listed in Table 5B; v) at least 17, 18, 19, or 20 contiguous nucleotides of a sequence from (iv); or vi) a guide sequence that is at least 95%, 90%, or 85% identical to a sequence selected from (v); and optionally
   [0998] (b) the mRNA or composition of any one of embodiments A11-A75.
[0999] Embodiment A185. The composition of embodiment A184, wherein the guide sequence comprises any one of SEQ ID NOs: 618-621.
[1000] Embodiment A186. The composition of embodiment A184 or A185, for use in altering a DNA sequence within the TRBC1 and/or TRBC2 gene in a cell.
[1001] Embodiment A187. The composition of any one of embodiments A184 to A186 for use in reducing the expression of the TRBC1 and/or TRBC2 gene in a cell.
[1002] Embodiment A188. The composition of any one of embodiments A184 to A187, for use in immunotherapy of a subject.
[1003] Embodiment A189. A cell, altered by the method of any one of embodiments A120-A121, and A161-A178.
[1004] Embodiment A190. The cell according to embodiment A189, wherein the cell is altered ex vivo.
[1005] Embodiment A191. The cell according to embodiment A189 or 190, wherein the cell is a T cell.
[1006] Embodiment A192. The cell according to any of embodiments A189-A191, wherein the cell is a CD4⁺ or CD8⁺ T cell.
[1007] Embodiment A193. The cell according to any of embodiments A189-A192, wherein the cell is a mammalian, primate, or human cell.
[1008] Embodiment A194. The cell according to any of embodiments A189-A193, for use in immunotherapy of a subject.
[1009] Embodiment A195. An engineered cell which has reduced or eliminated surface expression of TRAC, comprising a genetic modification in a human TRAC gene, wherein the genetic modification comprises a modification of at least one nucleotide within the genomic coordinates selected from:
   [1010] chr14: 22547596-22547616; chr14: 22550570-22550590; chr14: 22547763-22547783; chr14: 22550596-22550616; chr14: 22550566-22550586; chr14: 22547753-22547773; chr14: 22550601-22550621; chr14: 22550599-22550619; chr14: 22547583-22547603; chr14: 22547671-22547691; chr14: 22547770-22547790; chr14: 22547676-22547696; chr14: 22547772-22547792; chr14: 22547771-22547791; chr14: 22547733-22547753; chr14: 22547776-22547796.
[1011] Embodiment A196. An engineered cell which has reduced or eliminated surface expression of TRBC1/2, comprising a genetic modification in a human TRBC1/2 gene, wherein the genetic modification comprises a modification of at least one nucleotide within the genomic coordinates selected from:
   [1012] chr7: 142791757-142791777; chr7: 142801104-142801124; chr7: 142791811-142791831; chr7: 142801158-142801178; chr7: 142792728-142792748; chr7: 142791719-142791739; chr7: 142791766-142791786; chr7: 142801113-142801133; chr7: 142791928-142791948; chr7: 142801275-142801295; chr7: 142792062-142792082; chr7: 142801409-142801429; chr7: 142792713-142792733; chr7: 142802126-142802146; chr7: 142791808-142791828; chr7: 142801155-142801175; chr7: 142792003-142792023; chr7: 142801350-142801370; chr7: 142791760-142791780; chr7: 142791715-142791735; chr7: 142792781-142792801; chr7: 142792040-142792060; chr7: 142801387-142801407; chr7: 142791862-142791882; chr7: 142791716-142791736; chr7: 142791787-142791807; chr7: 142791759-142791779; chr7: 142801106-142801126; chr7: 142791807-142791827; chr7: 142801154-142801174; chr7: 142791879-142791899; chr7: 142801226-142801246; chr7: 142791805-142791825; chr7: 142791700-142791720; chr7: 142791765-142791785; chr7: 142801112-142801132; chr7: 142791820-142791840; chr7: 142791872-142791892; chr7: 142801219-142801239; chr7: 142791700-142791720; chr7: 142791806-142791826; chr7: 142801153-142801173; chr7: 142792035-142792055; chr7: 142792724-142792744; chr7: 142792754-142792774; chr7: 142791804-142791824; chr7: 142792684-142792704; chr7: 142791823-142791843; chr7: 142792728-142792748; chr7: 142792721-142792741; chr7: 142792749-142792769; chr7: 142792685-142792705; chr7: 142791816-142791836; chr7: 142801163-142801183; chr7: 142792686-142792706; chr7: 142791793-142791813; chr7: 142793110-142793130; chr7: 142791815-142791835; chr7: 142801162-142801182; chr7: 142792770-142792790; chr7: 142792047-142792067; chr7: 142801394-142801414; chr7: 142791871-142791891; chr7: 142801218-142801238; chr7: 142791894-142791914; chr7: 142792723-142792743; chr7: 142792724-142792744; chr7: 142791897-142791917; chr7: 142801244-142801264; chr7: 142792757-142792777; chr7: 142792740-142792760; chr7: 142792758-142792778.
[1013] Embodiment A197. One or more lipid nucleic acid assembly compositions, optionally lipid nanoparticles, comprising:
   [1014] (a) a first mRNA comprising a first open reading frame encoding a polypeptide comprising an APOBEC3A deaminase (A3A) and an RNA-guided nickase;
   [1015] (b) a second mRNA comprising a second open reading frame encoding a uracil glycosylase inhibitor (UGI); and
   [1016] (c) one or more guide RNAs.
[1017] Embodiment A198. The method, cell, or engineered cell of any one of the preceding embodiments, wherein the cell is an immune cell.
[1018] Embodiment A199. The method, cell, or engineered cell of any one of the preceding embodiments, wherein the cell is a lymphocyte.
[1019] Embodiment A200. The method, cell, or engineered cell of any one of the preceding embodiments, wherein the cell is a T cell.

[1020] The following numbered embodiments provide additional support for and descriptions of the embodiments herein.
[1021] Embodiment B1. An mRNA comprising an open reading frame encoding a polypeptide comprising a cytidine deaminase and an RNA-guided nickase, wherein the polypeptide does not comprise a uracil glycosylase inhibitor (UGI).
[1022] Embodiment B2. A composition comprising a first mRNA comprising a first open reading frame encoding a polypeptide comprising a cytidine deaminase and an RNA-guided nickase, and a second mRNA comprising a second open reading frame encoding a uracil glycosylase inhibitor (UGI), wherein the second mRNA is different from the first mRNA, optionally wherein the composition comprises lipid nanoparticles.
[1023] Embodiment B3. The composition of embodiment B2, wherein the first open reading frame does not comprise a sequence encoding a UGI.
[1024] Embodiment B4. The composition of embodiment B2 or B3, wherein the molar ratio of the second mRNA to the first mRNA is from 1:1 to 30:1.
[1025] Embodiment B5. The composition of any one of embodiments B2-B4, wherein the composition comprises a first composition and a second composition, wherein the first composition comprises a first mRNA comprising a first open reading frame encoding a polypeptide comprising a cytidine deaminase and an RNA-guided nickase and does not comprise a uracil glycosylase inhibitor (UGI), and the second composition comprises a second mRNA comprising a second open reading frame encoding a uracil glycosylase inhibitor (UGI), wherein the second mRNA is different from the first mRNA, optionally wherein the compositions comprise lipid nanoparticles.
[1026] Embodiment B6. The composition of any one of embodiments B2-B5, wherein the first mRNA and the second mRNAs are in the same or separate vials.
[1027] Embodiment B7. A method of modifying a target gene comprising delivering to a cell a first mRNA comprising a first open reading frame encoding a first polypeptide comprising a cytidine deaminase and an RNA-guided nickase, a second mRNA comprising a second open reading frame encoding a uracil glycosylase inhibitor (UGI), wherein the second mRNA is different from the first mRNA, and at least one guide RNA (gRNA), wherein if the nickase is a SpyCas9 nickase, then the gRNA is a SpyCas9 gRNA, and if the nickase is a NmeCas9 nickase, then the gRNA is a Nme gRNA.
[1028] Embodiment B8. The composition or method of any one of embodiments B2-B7, wherein the molar ratio of the second mRNA to the first mRNA is from 1:1 to 30:1.
[1029] Embodiment B9. The composition or method of any one of embodiments B2-B7, wherein the molar ratio is from 2:1 to 30:1.
[1030] Embodiment B10. The composition or method of any one of embodiments B2-B7, wherein the molar ratio is from 7:1 to 22:1.
[1031] Embodiment B11. A cell comprising a composition comprising a first mRNA comprising a first open reading frame encoding a polypeptide comprising a cytidine deaminase and an RNA-guided nickase, and a second mRNA comprising a second open reading frame encoding a uracil glycosylase inhibitor (UGI), wherein the second mRNA is different from the first mRNA.
[1032] Embodiment B12. An engineered cell comprising at least one base edit and/or indel, wherein the base edit and/or indel is made by contacting a cell with a composition comprising a first mRNA comprising a first open reading frame encoding a polypeptide comprising a cytidine deaminase and an RNA-guided nickase, and a second mRNA comprising a second open reading frame encoding a uracil glycosylase inhibitor (UGI), wherein the second mRNA is different from the first mRNA.
[1033] Embodiment B13. The mRNA, composition, method, cell, or engineered cell of any one of the preceding embodiments, wherein the cytidine deaminase is
[1034] (i) an enzyme of APOBEC family, optionally an enzyme of APOBEC3 subgroup;
[1035] (ii) a cytidine deaminase comprising an amino acid sequence that is at least 80% identical to any one of SEQ ID NOs: 40, 41, and 960-1023;
[1036] (iii) a cytidine deaminase comprising an amino acid sequence that is at least 80% identical to any one of SEQ ID NOs: 40, 41, and 960-1013;
[1037] (iv) a cytidine deaminase comprising an amino acid sequence that is at least 80% identical to any one of SEQ ID NOs: 40, 41, 976, 977, 979, 980, 984-987, 993-1006, and 1009; or
[1038] (v) a cytidine deaminase comprising an amino acid sequence that is at least 80% identical to any one of SEQ ID NOs: 40, 976, 981, 984, 986, and 1014-1023.
[1039] Embodiment B314. The mRNA, composition, method, cell, or engineered cell of embodiment B13, wherein the cytidine deaminase comprises an amino acid sequence with at least 80%, 85%, 87%, 90%, 95%, 98%, 99%, or 100% identity to SEQ ID NO: 40, 41, and 960-1023.
[1040] Embodiment B15. The mRNA, composition, method, cell, or engineered cell of embodiment B13, wherein the cytidine deaminase comprises an amino acid sequence with at least 80%, 85%, 87%, 90%, 95%, 98%, 99%, or 100% identity to SEQ ID NO: 40, 41, and 960-1013.
[1041] Embodiment B16. The mRNA, composition, method, cell, or engineered cell of embodiment B13, wherein the cytidine deaminase comprises an amino acid sequence with at least 80%, 85%, 87%, 90%, 95%, 98%, 99%, or 100% identity to SEQ ID NO: 40, 41, 976, 977, 979, 980, 984-987, 993-1006, and 1009.
[1042] Embodiment B17. The mRNA, composition, method, cell, or engineered cell of embodiment B13, wherein the cytidine deaminase comprises an amino acid sequence with at least 80%, 85%, 87%, 90%, 95%, 98%, 99%, or 100% identity to SEQ ID NO: 40, 976, 981, 984, 986, 1014-1023.
[1043] Embodiment B18. The mRNA, composition, method, cell, or engineered cell of any one of the preceding embodiments, wherein the cytidine deaminase is an APOBEC3A deaminase (A3A).
[1044] Embodiment B19. The mRNA, composition, method, cell, or engineered cell of embodiment B18, wherein the A3A comprises an amino acid sequence with at least 87% identity to SEQ ID NO: 40.
[1045] Embodiment B20. The mRNA, composition, method, cell, or engineered cell of embodiment B18, wherein the A3A comprises an amino acid sequence with at least 90% identity to SEQ ID NO: 40.
[1046] Embodiment B21. The mRNA, composition, method, cell, or engineered cell of embodiment B18, wherein the A3A comprises an amino acid sequence with at least 95% identity to SEQ ID NO: 40.
[1047] Embodiment B22. The mRNA, composition, method, cell, or engineered cell of embodiment B18, wherein the A3A comprises an amino acid sequence with at least 98% identity to SEQ ID NO: 40.
[1048] Embodiment B23. The mRNA, composition, method, cell, or engineered cell of embodiment B18, wherein the A3A comprises an amino acid sequence with at least 99% identity to SEQ ID NO: 40.
[1049] Embodiment B24. The mRNA, composition, method, cell, or engineered cell of embodiment B18, wherein the A3A comprises the amino acid sequence of SEQ ID NO: 40.
[1050] Embodiment B25. The mRNA, composition, method, cell, or engineered cell of any one of embodiments B18-B24, wherein the A3A is a human A3A.
[1051] Embodiment B26. The mRNA, composition, method, cell, or engineered cell of any one of embodiments B18-B24, wherein the A3A is a wild-type A3A.
[1052] Embodiment B27. The mRNA, composition, method, cell, or engineered cell of embodiment B18, wherein the A3A comprises an amino acid sequence with at least 87%, 90%, 95%, 98%, 99%, or 100% identity to SEQ ID NO: 976, 977, 993-1006, and 1009.
[1053] Embodiment B28. The composition, method, cell, or engineered cell of any one of the preceding embodiments, wherein the UGI comprises an amino acid sequence with at least 80% identity to SEQ ID NO: 27.
[1054] Embodiment B29. The composition, method, cell, or engineered cell of any one of the preceding embodiments, wherein the UGI comprises an amino acid sequence with at least 90% identity to SEQ ID NO: 27.
[1055] Embodiment B30. The composition, method, cell, or engineered cell of any one of the preceding embodiments, wherein the UGI comprises an amino acid sequence with at least 95% identity to SEQ ID NO: 27.
[1056] Embodiment B31. The composition, method, cell, or engineered cell of any one of the preceding embodiments, wherein the UGI comprises an amino acid sequence with at least 98% identity to SEQ ID NO: 27.
[1057] Embodiment B32. The composition, method, cell, or engineered cell of any one of the preceding embodiments, wherein the UGI comprises an amino acid sequence with at least 99% identity to SEQ ID NO: 27.
[1058] Embodiment B33. The composition, method, cell, or engineered cell of any one of the preceding embodiments, wherein the UGI comprises the amino acid sequence of SEQ ID NO: 27.
[1059] Embodiment B34. The composition, method, or cell of any one of the preceding embodiments, further comprising at least one guide RNA (gRNA).
[1060] Embodiment B35. The composition, method, cell, or engineered cell of any one of the preceding embodiments, comprising a gRNA, wherein the gRNA is an sgRNA.
[1061] Embodiment B36. The composition, method, cell, or engineered cell of any one of the preceding embodiments, comprising a gRNA, wherein the gRNA is a dgRNA.
[1062] Embodiment B37. The composition, method, cell, or engineered cell of any one of the preceding embodiments, comprising a gRNA, wherein the gRNA is a short-single guide RNA (short-sgRNA) comprising a conserved portion of an sgRNA comprising a hairpin region, wherein the hairpin region lacks at least 5-10 nucleotides and wherein the short-sgRNA comprises a 5′ end modification or a 3′ end modification or both.
[1063] Embodiment B38. The mRNA, composition, method, cell, or engineered cell of any one of the preceding embodiments, wherein the RNA-guided nickase is a Cas nickase.
[1064] Embodiment B39. The mRNA, composition, method, cell, or engineered cell of any one of the preceding embodiments, wherein the RNA-guided nickase is a Class 2 Cas nickase.
[1065] Embodiment B40. The mRNA, composition, method, cell, or engineered cell of any one of the preceding embodiments, wherein the RNA-guided nickase is a Cas9 nickase.
[1066] Embodiment B41. The mRNA, composition, method, cell, or engineered cell of any one of the preceding embodiments, wherein the RNA-guided nickase is an S. pyogenes (Spy) Cas9 nickase.
[1067] Embodiment B42. The mRNA, composition, method, cell, or engineered cell of embodiment B41, wherein the RNA-guided nickase is a D10A SpyCas9 nickase.
[1068] Embodiment B43. The mRNA, composition, method, cell, or engineered cell of any one of the preceding embodiments, wherein the RNA-guided nickase comprises an amino acid sequence having at least 80%, 90%, 95%, 98%, or 99% identity to any one of SEQ ID NOs: 70, 73, or 76.
[1069] Embodiment B44. The mRNA, composition, method, cell, or engineered cell of any one of the preceding embodiments, wherein the RNA-guided nickase comprises the amino acid sequence of any one of SEQ ID NOs: 70, 73, or 76.
[1070] Embodiment B45. The mRNA, composition, method, cell, or engineered cell of any one of the preceding embodiments, wherein the sequence encoding the RNA-guided nickase comprises a nucleotide sequence having at least 80%, 90%, 95%, 98%, or 99% identity to the nucleotide sequence of any one of SEQ ID NOs: 72, 75, or 78.
[1071] Embodiment B46. The mRNA, composition, method, cell, or engineered cell of any one of the preceding embodiments, wherein the sequence encoding the RNA-guided nickase comprises a nucleotide sequence having at least 90% to the nucleotide sequence of any one of SEQ ID NOs: 72, 75, or 78.
[1072] Embodiment B47. The mRNA, composition, method, cell, or engineered cell of any one of the preceding embodiments, wherein the sequence encoding the RNA-guided nickase comprises a nucleotide sequence having at least 95% to the nucleotide sequence of any one of SEQ ID NOs: 72, 75, or 78.
[1073] Embodiment B48. The mRNA, composition, method, cell, or engineered cell of any one of the preceding embodiments, wherein the sequence encoding the RNA-guided nickase comprises a nucleotide sequence having at least 98% to the nucleotide sequence of any one of SEQ ID NOs: 72, 75, or 78.
[1074] Embodiment B49. The mRNA, composition, method, cell, or engineered cell of any one of the preceding embodiments, wherein the sequence encoding the RNA-guided nickase comprises a nucleotide sequence having at least 99% to the nucleotide sequence of any one of SEQ ID NOs: 72, 75, or 78.
[1075] Embodiment B50. The mRNA, composition, method, cell, or engineered cell of any one of the preceding embodiments, wherein the sequence encoding the RNA-guided nickase comprises the nucleotide sequence of any one of SEQ ID NOs: 71, 72, 74, 75, or 77-90.
[1076] Embodiment B51. The mRNA, composition, method, cell, or engineered cell of any one of embodiments B1-37, wherein the RNA-guided nickase is a N. meningitidis (Nme) Cas9 nickase.
[1077] Embodiment B52. The mRNA, composition, method, cell, or engineered cell of embodiment B51, wherein the RNA-guided nickase is a D16A NmeCas9 nickase, optionally a D16A Nme2Cas9.
[1078] Embodiment B53. The mRNA, composition, method, cell, or engineered cell of any one of embodiments B1-B37, B51, or B52, wherein the sequence encoding the RNA-guided nickase comprises the nucleotide sequence of any one of SEQ ID NOs: 380 and 387.
[1079] Embodiment B54. The mRNA, composition, method, cell, or engineered cell of any one of the preceding embodiments, wherein the mRNA comprises a 5′ UTR with at least 90% identity to any one of SEQ ID NOs: 91-98.
[1080] Embodiment B55. The mRNA, composition, method, cell, or engineered cell of any one of the preceding embodiments, wherein the mRNA comprises a 3′ UTR with at least 90% identity to any one of SEQ ID NOs: 99-106.
[1081] Embodiment B56. The mRNA, composition, method, cell, or engineered cell of any one of the preceding embodiments, wherein the mRNA comprises a 5′ UTR and a 3′ UTR from the same source.
[1082] Embodiment B57. The mRNA, composition, method, cell, or engineered cell of any one of the preceding embodiments, wherein the mRNA comprises a 5′ cap selected from Cap0, Cap1, and Cap2.
[1083] Embodiment B58. The mRNA, composition, method, cell, or engineered cell of any one of the preceding embodiments, wherein the open reading frame encoding a polypeptide comprising a cytidine deaminase and an RNA-guided nickase, and/or the open reading frame encoding a uracil glycosylase inhibitor (UGI) comprise minimal adenine codons and/or minimal uridine codons.
[1084] Embodiment B59. The mRNA, composition, method, cell, or engineered cell of any one of the preceding embodiments, wherein the open reading frame encoding a polypeptide comprising a cytidine deaminase and an RNA-guided nickase, and/or the open reading frame encoding a uracil glycosylase inhibitor (UGI) comprise minimal adenine codons.
[1085] Embodiment B60. The mRNA, composition, method, cell, or engineered cell of any one of the preceding embodiments, wherein the open reading frame encoding a polypeptide comprising a cytidine deaminase and an RNA-guided nickase, and/or the open reading frame encoding a uracil glycosylase inhibitor (UGI) have codons that increase translation of the mRNA in a mammal.
[1086] Embodiment B61. The mRNA, composition, method, cell, or engineered cell of any one of the preceding embodiments, wherein the open reading frame encoding a polypeptide comprising a cytidine deaminase and an RNA-guided nickase, and/or the open reading frame encoding a uracil glycosylase inhibitor (UGI) have codons that increase translation of the mRNA in a mammal, wherein the mammal is a human.
[1087] Embodiment B62. The mRNA, composition, method, cell, or engineered cell of any one of the preceding embodiments, wherein the cytidine deaminase is located N-terminal to the RNA-guided nickase in the polypeptide.
[1088] Embodiment B63. The mRNA, composition, method, cell, or engineered cell of any one of the preceding embodiments, wherein the encoded RNA-guided nickase comprises a nuclear localization signal (NLS).
[1089] Embodiment B64. The mRNA, composition, method, cell, or engineered cell of any one of the preceding embodiments, wherein the encoded RNA-guided nickase comprises a nuclear localization signal (NLS), and wherein the NLS is at the C-terminus of the RNA-guided nickase.
[1090] Embodiment B65. The mRNA, composition, method, cell, or engineered cell of any one of the preceding embodiments, wherein the encoded RNA-guided nickase comprises a nuclear localization signal (NLS), and wherein the NLS is at the N-terminus of the RNA-guided nickase, or wherein an NLS is fused to both the N-terminus and C-terminus of the RNA-guided nickase.
[1091] Embodiment B66. The mRNA, composition, method, cell, or engineered cell of any one of the preceding embodiments, wherein the encoded RNA-guided nickase comprises a nuclear localization signal (NLS), and wherein a linker is present between the N-terminus of the RNA-guided nickase and the NLS, optionally wherein the linker is a peptide linker.
[1092] Embodiment B67. The mRNA, composition, method, cell, or engineered cell of any one of the preceding embodiments, wherein the encoded RNA-guided nickase comprises a nuclear localization signal (NLS), and wherein the NLS comprises a sequence having at least 80%, 85%, 90%, or 95% identity to any one of SEQ ID NOs: 63 and 110-122.
[1093] Embodiment B68. The mRNA, composition, method, cell, or engineered cell of any one of the preceding embodiments, wherein the encoded RNA-guided nickase comprises a nuclear localization signal (NLS), and wherein the NLS comprises the sequence of any one of SEQ ID NOs: 63 and 110-122.
[1094] Embodiment B69. The mRNA, composition, method, cell, or engineered cell of any one of the preceding embodiments, wherein the encoded RNA-guided nickase comprises a nuclear localization signal (NLS), and wherein the NLS is encoded by a sequence having at least 80%, 85%, 90%, 95%, 98% or 100% identity to the sequence of any one of SEQ ID NOs: 123-135.
[1095] Embodiment B70. The mRNA, composition, method, cell, or engineered cell of any one of the preceding embodiments, wherein the encoded RNA-guided nickase comprises a nuclear localization signal (NLS), and wherein the cytidine deaminase is located N-terminal to the NLS in the polypeptide.
[1096] Embodiment B71. The mRNA, composition, method, cell, or engineered cell of any one of the preceding embodiments, wherein the encoded RNA-guided nickase comprises a nuclear localization signal (NLS), and wherein the RNA-guided nickase is located N-terminal to the NLS in the polypeptide.
[1097] Embodiment B72. The mRNA, composition, method, cell, or engineered cell of any one of the preceding embodiments, wherein the open reading frame encoding a polypeptide comprising a cytidine deaminase and an RNA-guided nickase comprises a sequence having at least 80%, 85%, 90%, 95%, 98% or 100% identity to the sequence of SEQ ID NO:1.
[1098] Embodiment B73. The mRNA, composition, method, cell, or engineered cell of any one of the preceding embodiments, wherein the open reading frame encoding a polypeptide comprising a cytidine deaminase and an RNA-guided nickase comprises a sequence having at least 80%, 85%, 90%, 95%, 98% or 100% identity to the sequence of SEQ ID NO: 4.
[1099] Embodiment B74. The mRNA, composition, method, cell, or engineered cell of any one of the preceding embodiments, wherein at least 10% of the uridine in the mRNA is substituted with a modified uridine.
[1100] Embodiment B75. The mRNA, composition, method, cell or engineered cell of embodiment B64, wherein the modified uridine is one or more of N1-methyl-pseudouridine, pseudouridine, 5-methoxyuridine, or 5-iodouridine.
[1101] Embodiment B76. The mRNA, composition, method, cell, or engineered cell of embodiment B64 or 65, wherein the modified uridine is one or both of N1-methyl-pseudouridine or 5-methoxyuridine.
[1102] Embodiment B77. The mRNA, composition, method, cell, or engineered cell of any one of embodiments B74-B76, wherein the modified uridine is N1-methyl-pseudouridine.
[1103] Embodiment B78. The mRNA, composition, method, cell, or engineered cell of any one of embodiments B74-B76, wherein the modified uridine is 5-methoxyuridine.
[1104] Embodiment B79. The mRNA, composition, method, cell, or engineered cell of any one of embodiments B74-B78, wherein 15% to 45% of the uridine is substituted with the modified uridine.
[1105] Embodiment B80. The mRNA, composition, method, cell, or engineered cell of any one of embodiments B74-B79, wherein at least 20% or at least 30% of the uridine is substituted with the modified uridine.
[1106] Embodiment B81. The mRNA, composition, method, cell, or engineered cell of any one of embodiments B74-B80, wherein at least 80% or at least 90% of the uridine is substituted with the modified uridine.
[1107] Embodiment B82. The mRNA, composition, method, cell, or engineered cell of any one of embodiments B74-B81, wherein 100% uridine is substituted with the modified uridine.
[1108] Embodiment B83. The mRNA, composition, method, or cell of any one of the preceding embodiments, further encoding a peptide linker between the cytidine deaminase and RNA-guided nickase, optionally wherein the peptide linker is XTEN.
[1109] Embodiment B84. The mRNA, composition, method, or cell of any one of the preceding embodiments, further encoding a peptide linker between the cytidine deaminase and RNA-guided nickase, wherein the peptide linker comprises at least 1, at least 2, at least 3, at least 4, at least 5, at least 6, at least 7, at least 8, at least 9, at least 10, at least 15, at least 20, at least 25, at least 30, at least 40, at least 50, or more amino acids.
[1110] Embodiment B85. The mRNA, composition, method, or cell of any one of the preceding embodiments, further encoding a peptide linker between the cytidine deaminase and RNA-guided nickase, wherein the peptide linker comprises one or more sequences selected from SEQ ID NOs: 46-59, 61 and 211-272.
[1111] Embodiment B86. A polypeptide encoded by the mRNA of any one of the preceding embodiments.
[1112] Embodiment B87. A ribonucleoprotein complex (RNP) comprising (i) a polypeptide encoded by any one the mRNAs of any one of the preceding embodiments; and (ii) a guide RNA.
[1113] Embodiment B88. A vector comprising the mRNA of any one of the preceding embodiments.
[1114] Embodiment B89. An expression construct comprising a promoter operably linked to a sequence encoding the mRNA of any one of the preceding embodiments.
[1115] Embodiment B90. A plasmid comprising the expression construct of embodiment B89.
[1116] Embodiment B91. A host cell comprising the vector of embodiment B88, the expression construct of embodiment B89, or the plasmid of embodiment B90.
[1117] Embodiment B92. The mRNA or composition of any one of the preceding embodiments, wherein the mRNA or composition is formulated as a lipid nucleic acid assembly composition, optionally a lipid nanoparticle.
[1118] Embodiment B93. Use of the mRNA or composition according to any one of the preceding embodiments for modifying a target gene in a cell.
[1119] Embodiment B94. Use of the mRNA or composition according to any one of the preceding embodiments for the manufacture of a medicament for modifying a target gene in a cell.
[1120] Embodiment B95. A method of modifying a target gene in a cell, comprising delivering to the cell one or more lipid nucleic acid assembly compositions, optionally lipid nanoparticles, comprising:
[1121] (a) a first mRNA comprising a first open reading frame encoding a polypeptide comprising a cytidine deaminase and an RNA-guided nickase;
[1122] (b) a second mRNA comprising a second open reading frame encoding a uracil glycosylase inhibitor (UGI); and
[1123] (c) one or more guide RNAs.
[1124] Embodiment B96. The method of embodiment B95, wherein parts (a) and (b) are in separate lipid nucleic acid assembly compositions.
[1125] Embodiment B97. The method of embodiment B95, wherein parts (a) and (b) are in the same lipid nucleic acid assembly composition.
[1126] Embodiment B98. The method of embodiment B95, wherein parts (a) and (c) are in separate lipid nucleic acid assembly compositions.
[1127] Embodiment B99. The method of embodiment B95, wherein parts (a) and (c) are in the same lipid nucleic acid assembly composition.
[1128] Embodiment B3100. The method of embodiment B95, wherein parts (b) and (c) are in separate lipid nucleic acid assembly compositions.
[1129] Embodiment B101. The method of embodiment B95, wherein parts (a) and (c) are in the same lipid nucleic acid assembly composition, and part (b) is in a separate lipid nucleic acid assembly composition.
[1130] Embodiment B102. The method of embodiment B95, wherein parts (a), (b), and (c) are each in separate lipid nucleic acid assembly compositions.
[1131] Embodiment B103. The method of embodiment B95, wherein parts (a), (b), and (c) are in the same lipid nucleic acid assembly composition.
[1132] Embodiment B104. The method of any one of embodiments B95, and B98-B103, wherein the one or more guide RNAs are each in separate lipid nucleic acid assembly compositions.
[1133] Embodiment B105. The method of any one of embodiments B95-B104, comprising delivering to the cell a lipid nucleic acid assembly composition comprising a first mRNA comprising a first open reading frame encoding a polypeptide comprising a cytidine deaminase and an RNA-guided nickase and a second mRNA comprising a second open reading frame encoding a uracil glycosylase inhibitor (UGI) in the same lipid nucleic acid assembly composition.
[1134] Embodiment B106. The method of any one of embodiments B95-B104, comprising delivering to the cell a first lipid nucleic acid assembly composition comprising a first mRNA comprising a first open reading frame encoding a polypeptide comprising a cytidine deaminase and an RNA-guided nickase, and a second lipid nucleic acid assembly composition comprising a second mRNA comprising a second open reading frame encoding a uracil glycosylase inhibitor (UGI).
[1135] Embodiment B107. The method of any one of embodiments B95-B104, further comprising delivering one or more guide RNAs in one or more lipid nucleic acid assembly compositions that are separate from the lipid nucleic acid assembly compositions comprising the cytidine deaminase and UGI.
[1136] Embodiment B108. The method of any one of embodiments B95-B107, wherein at least 2, 3, 4, 5, 6, 7, 8, 9, or 10 lipid nucleic acid assembly compositions are delivered to the cell.
[1137] Embodiment B109. The method of any one of embodiments B95-B108, wherein at least one lipid nucleic acid assembly composition comprises lipid nanoparticle (LNPs), optionally wherein all lipid nucleic acid assembly compositions comprise LNPs.
[1138] Embodiment B3110. The method of any one of embodiments B95-B109, wherein at least one lipid nucleic acid assembly composition is a lipoplex composition.
[1139] Embodiment B111. The method of any one of embodiments B95-B110, wherein the lipid nucleic acid assembly composition comprises an ionizable lipid.
[1140] Embodiment B112. The method of any one of embodiments B95-B111, wherein the lipid nucleic acid assembly composition comprises an ionizable lipid and wherein the ionizable lipid comprises a biodegradable ionizable lipid.
[1141] Embodiment B113. The method of any one of embodiments B95-B112, wherein the lipid nucleic acid assembly composition comprises an ionizable lipid and wherein the ionizable lipid has a PK value in the range of pKa in the range of from about 5.1 to about 7.4, such as from about 5.5 to about 6.6, from about 5.6 to about 6.4, from about 5.8 to about 6.2, or from about 5.8 to about 6.5.
[1142] Embodiment B114. The method of any one of embodiments B95-B113, wherein the lipid nucleic acid assembly composition comprises an amine lipid.
[1143] Embodiment B115. The method of any one of embodiments B95-B114, wherein the lipid nucleic acid assembly composition comprises Lipid A.
[1144] Embodiment B116. The method of any one of embodiments B95-B115, wherein the lipid nucleic acid assembly composition comprises a helper lipid.
[1145] Embodiment B117. The method of any one of embodiments B95-B116, wherein the lipid nucleic acid assembly composition comprises a helper lipid, wherein the helper lipid is cholesterol.
[1146] Embodiment B118. The method of any one of embodiments B95-B117, wherein the lipid nucleic acid assembly composition comprises a stealth lipid.
[1147] Embodiment B119. The method of any one of embodiments B95-B118, wherein the lipid nucleic acid assembly composition comprises a stealth lipid, wherein the stealth lipid is PEG2k-DMG.
[1148] Embodiment B120. The method of any one of embodiments B95-B119, wherein the lipid nucleic acid assembly composition comprises a neutral lipid.
[1149] Embodiment B121. The method of any one of embodiments B95-B120, wherein the lipid nucleic acid assembly composition comprises a neutral lipid, wherein the neutral lipid is DSPC.
[1150] Embodiment B122. The method of any one of embodiments B95-B121, wherein the lipid nucleic acid assembly composition comprises a neutral lipid, wherein the neutral lipid is present at about 9 mol-%.
[1151] Embodiment B123. The method of any one of embodiments B95-B122, wherein the lipid nucleic acid assembly composition comprises a stealth lipid, wherein the stealth lipid is present at about 3 mol-%.
[1152] Embodiment B124. The method of any one of embodiments B95-B123, wherein the lipid nucleic acid assembly composition comprises a helper lipid, wherein the helper lipid is present at about 38 mol-%.
[1153] Embodiment B125. The method of any one of embodiments B95-B124, wherein the N/P ratio of the lipid nucleic acid assembly composition is about 6.
[1154] Embodiment B126. The method of any one of embodiments B95-B125, wherein the lipid nucleic acid assembly composition comprises about 50 mol-% amine lipid such as Lipid A; about 9 mol-% neutral lipid such as DSPC; about 3 mol-% of stealth lipid such as a PEG lipid, such as PEG2k-DMG, and the remainder of the lipid component is helper lipid such as cholesterol wherein the N/P ratio of the is about 6.
[1155] Embodiment B127. The method of any one of embodiments B95-B126, comprising one gRNA that targets a gene that reduces or eliminates MHC class I expression on the surface of a cell, and/or one gRNA that targets a gene that reduces or eliminates MHC class II expression on the surface of a cell, and/or one gRNA that targets a gene that reduces or eliminates endogenous TCR expression.
[1156] Embodiment B128. The method of any one of embodiments B95-B127, comprising at least two gRNAs selected from: one gRNA that targets a gene that reduces or eliminates MHC class I expression on the surface of a cell, one gRNA that targets a gene that reduces or eliminates MHC class II expression on the surface of a cell, and one gRNA that targets a gene that reduces or eliminates endogenous TCR expression.
[1157] Embodiment B129. The method of any one of embodiments B95-B128, comprising one gRNA that targets a gene that reduces or eliminates MHC class I expression on the surface of a cell, one gRNA that targets a gene that reduces or eliminates MHC class II expression on the surface of a cell, and one gRNA that targets a gene that reduces or eliminates endogenous TCR expression.
[1158] Embodiment B130. The method of any one of embodiments B95-129, comprising one gRNA selected from a gRNA that targets TRAC, TRBC, B2M, HLA-A, or CIITA.
[1159] Embodiment B131. The method of any one of embodiments B95-B130, wherein the gRNA targets TRBC, wherein the gRNA comprises a guide sequence chosen from: i) SEQ ID NOs: 706-721; ii) at least 17, 18, 19, or 20 contiguous nucleotides of a sequence selected from SEQ ID NOs: 706-721; iii) a guide sequence at least 95%, 90%, or 85% identical to a sequence selected from SEQ ID NOs: 706-721; iv) a sequence that comprises 10 contiguous nucleotides±10 nucleotides of a genomic coordinate listed in Table 5A; v) at least 17, 18, 19, or 20 contiguous nucleotides of a sequence from (iv); or vi) a guide sequence that is at least 95%, 90%, or 85% identical to a sequence selected from (v).
[1160] Embodiment B132. The method of any one of embodiments B95-B130, wherein the gRNA targets TRBC, wherein the gRNA comprises a guide sequence chosen from: i) SEQ ID NOs: 618-669; ii) at least 17, 18, 19, or 20 contiguous nucleotides of a sequence selected from SEQ ID NOs: 618-669; iii) a guide sequence at least 95%, 90%, or 85% identical to a sequence selected from SEQ ID NOs: 618-669; iv) a sequence that comprises 10 contiguous nucleotides±10 nucleotides of a genomic coordinate listed in Table 5B; v) at least 17, 18, 19, or 20 contiguous nucleotides of a sequence from (iv); or vi) a guide sequence that is at least 95%, 90%, or 85% identical to a sequence selected from (v).
[1161] Embodiment B133. The method of any one of embodiments B95-B130, comprising at least two gRNAs selected from a gRNA that targets TRAC, TRBC, or B2M, wherein the two guide RNAs do not target the same gene.
[1162] Embodiment B134. The method of any one of embodiments B95-B130, comprising at least two gRNAs selected from a gRNA that targets TRAC, TRBC, or HLA-A, wherein the two guide RNAs do not target the same gene.
[1163] Embodiment B135. The method of any one of embodiments B95-B130, comprising one guide RNA that targets TRAC, and one gRNA that targets TRBC.
[1164] Embodiment B136. The method of any one of embodiments B95-B130, comprising one guide RNA that targets B2M, and one gRNA that targets CIITA.
[1165] Embodiment B137. The method of any one of embodiments B95-B130, comprising one guide RNA that targets HLA-A, and one gRNA that targets CIITA, optionally wherein the cell is homozygous for HLA-B and homozygous for HLA-C.
[1166] Embodiment B138. The method of any one of embodiments B95-B130, comprising one guide RNA that targets TRAC, and one gRNA that targets TRBC, and one gRNA that targets B2M.
[1167] Embodiment B139. The method of any one of embodiments B95-B130, comprising one guide RNA that targets TRAC, and one gRNA that targets TRBC, and one gRNA that targets HLA-A, optionally wherein the cell is homozygous for HLA-B and homozygous for HLA-C.
[1168] Embodiment B140. The method of any one of embodiments B95-B130, comprising one guide RNA that targets TRAC, and one gRNA that targets TRBC, one gRNA that targets B2M, and one gRNA that targets CIITA.
[1169] Embodiment B1141. The method of any one of embodiments B95-B130, comprising one guide RNA that targets TRAC, and one gRNA that targets TRBC, one gRNA that targets HLA-A, and one gRNA that targets CIITA, optionally wherein the cell is homozygous for HLA-B and homozygous for HLA-C.
[1170] Embodiment B142. The method of any one of the preceding embodiments, wherein the method generates a cytosine (C) to thymine (T) conversion within a target sequence.
[1171] Embodiment B143. The method of any one of the preceding embodiments, wherein the method causes at least 60% C-to-T conversion relative to the total edits in the target sequence.
[1172] Embodiment B144. The method of any one of the preceding embodiments, wherein the method causes at least 65%, 70%, 75%, 80%, 85%, 90%, 95%, 98%, or 99% C-to-T conversion relative to the total edits in the target sequence.
[1173] Embodiment B145. The method of any one of the preceding embodiments, wherein the ratio of C-to-T conversion to unintended edits is larger than 1:1.
[1174] Embodiment B146. The method of any one of the preceding embodiments, wherein the ratio of C-to-T conversion to unintended edits is from 2:1 to 99:1.
[1175] Embodiment B147. The method of any one of the preceding embodiments, wherein the ratio of C-to-T conversion to unintended edits is 2:1, 3:1, 4:1, 5:1, 6:1, 7:1, or 8:1.
[1176] Embodiment B148. The method of any one of the preceding embodiments, wherein the method causes the cytidine deaminase to make a base edit corresponding to any one of positions −1 to 10 relative to the 5′ end of the guide sequence.
[1177] Embodiment B149. The method of any one of the preceding embodiments, wherein the method causes the cytidine deaminase to make a base edit at a position 1, 2, 3, 4, 5, 6, 7, 8, 9, or 10 nucleotides from the 5′ end of the guide sequence.
[1178] Embodiment B150. The method of any one of the preceding embodiments, wherein the first mRNA, the second mRNA, and the guide RNA if present, delivered at a ratio of about 6:2:3 (w:w:w).
[1179] Embodiment B151. The method of any one of the preceding embodiments, wherein the mRNA, composition, or LNP is administered at a total RNA amount from 5 to 600 ng.
[1180] Embodiment B152. The method of any one of the preceding embodiments, wherein the total RNA amount is from 8 to 550 ng.
[1181] Embodiment B153. The method of any one of the preceding embodiments, wherein the total RNA amount is from 35 to 550 ng.
[1182] Embodiment B1154. The method of any one of the preceding embodiments, wherein the total RNA amount is from 70 to 550 ng.
[1183] Embodiment B155. The method of any one of the preceding embodiments, wherein the total RNA amount is from 138 to 550 ng.
[1184] Embodiment B156. The method of any one of the preceding embodiments, wherein the total RNA amount is from 275 to 550 ng.
[1185] Embodiment B157. The method, cell, or engineered cell of any one of the preceding embodiments, wherein the cell is a lymphocyte.
[1186] Embodiment B158. The method, cell, or engineered cell of any one of the preceding embodiments, wherein the cell is a B lymphocyte.
[1187] Embodiment B159. The method, cell, or engineered cell of any one of the preceding embodiments, wherein the cell is a T lymphocyte.
[1188] Embodiment B160. The method or use of any one of the preceding embodiments, wherein the modification of the target gene is in vivo.
[1189] Embodiment B161. The method or use of any one of the preceding embodiments, wherein the modification of the target gene is ex vivo.
[1190] Embodiment B162. The method or use of any one of the preceding embodiments, wherein the modification of the target gene reduces or eliminates expression of the target gene.
[1191] Embodiment B163. The method or use of any one of the preceding embodiments, wherein the genome editing or modification of the target gene reduces expression of the target gene by at least 50%, 55%, 60%, 65%, 70%, 75%, 80%, 85%, 90%, or 95%.
[1192] Embodiment B164. The method or use of any one of the preceding embodiments, wherein the genome editing or modification of the target gene produces a missense mutation in the gene.
[1193] Embodiment B165. A polypeptide comprising a cytidine deaminase and an RNA-guided nickase, wherein the polypeptide does not comprise a uracil glycosylase inhibitor (UGI).
[1194] Embodiment B166. A ribonucleoprotein complex (RNP) comprising the polypeptide of embodiment B165 and a guide RNA, wherein if the RNP comprises a SpyCas9 nickase, then the guide RNA is a Spy guide RNA, and wherein if the RNP comprises a NmeCas nickase, then the guide RNA is a Nme guide RNA.
[1195] Embodiment B167. A composition comprising a first polypeptide comprising a cytidine deaminase and an RNA-guided nickase, wherein the first polypeptide does not comprise a uracil glycosylase inhibitor (UGI), and a second polypeptide comprising a UGI, wherein the second polypeptide is different from the first polypeptide.
[1196] Embodiment B168. The polypeptide, RNP or composition of any one of embodiments B165-B167, wherein the cytidine deaminase is fused to the RNA-guided nickase via a peptide linker, optionally XTEN.
[1197] Embodiment B169. The polypeptide, RNP or composition of any one of embodiments B165-B167, wherein the cytidine deaminase is attached to a linker comprising an organic molecule, polymer, or chemical moiety.
[1198] Embodiment B170. A pharmaceutical composition comprising the mRNA, RNP, composition, or polypeptide of any of the preceding embodiments and a pharmaceutically acceptable carrier.
[1199] Embodiment B171. A kit comprising the mRNA, RNP, composition, or polypeptide of any of the preceding embodiments.
[1200] Embodiment B172. The mRNA, RNP, composition, method, cell, or engineered cell of any one of the preceding embodiments, wherein the polypeptide comprising a cytidine deaminase and an RNA-guided nickase includes: the cytidine deaminase, a linker, and the RNA-guided nickase in amino to carboxy terminal order.
[1201] Embodiment B173. A method of altering a DNA sequence within a TRAC gene, comprising delivering to a cell:
[1202] a. a gRNA comprising a guide sequence chosen from: i) SEQ ID NOs: 706-721; ii) at least 17, 18, 19, or 20 contiguous nucleotides of a sequence selected from SEQ ID NOs: 706-721; iii) a guide sequence at least 95%, 90%, or 85% identical to a sequence selected from SEQ ID NOs: 706-721; iv) a sequence that comprises 10 contiguous nucleotides±10 nucleotides of a genomic coordinate listed in Table 5A; v) at least 17, 18, 19, or 20 contiguous nucleotides of a sequence from (iv); or vi) a guide sequence that is at least 95%, 90%, or 85% identical to a sequence selected from (v); or
[1203] b. a nucleic acid encoding a gRNA of (a.).
[1204] Embodiment B174. A method of reducing the expression of a TRAC gene, comprising delivering to a cell:
[1205] a. a gRNA comprising a guide sequence chosen from: i) SEQ ID NOs: 706-721; ii) at least 17, 18, 19, or 20 contiguous nucleotides of a sequence selected from SEQ ID NOs: 706-721; iii) a guide sequence at least 95%, 90%, or 85% identical to a sequence selected from SEQ ID NOs: 706-721; iv) a sequence that comprises 10 contiguous nucleotides±10 nucleotides of a genomic coordinate listed in Table 5A; v) at least 17, 18, 19, or 20 contiguous nucleotides of a sequence from (iv); or vi) a guide sequence that is at least 95%, 90%, or 85% identical to a sequence selected from (v); or
[1206] b. a nucleic acid encoding a gRNA of (a.).
[1207] Embodiment B175. A method of immunotherapy comprising administering a composition comprising an engineered cell to a subject,
[1208] wherein the cell comprises a genomic modification of at least one nucleotide within the genomic coordinates selected from:
[1209] chr14: 22547596-22547616; chr14: 22550570-22550590; chr14: 22547763-22547783; chr14: 22550596-22550616; chr14: 22550566-22550586; chr14: 22547753-22547773; chr14: 22550601-22550621; chr14: 22550599-22550619; chr14: 22547583-22547603; chr14: 22547671-22547691; chr14: 22547770-22547790; chr14: 22547676-22547696; chr14: 22547772-22547792; chr14: 22547771-22547791; chr14: 22547733-22547753; chr14: 22547776-22547796; or
[1210] wherein the cell is engineered by delivering to the cell:
[1211] a. a gRNA comprising a guide sequence chosen from: i) SEQ ID NOs: 706-721; ii) at least 17, 18, 19, or 20 contiguous nucleotides of a sequence selected from SEQ ID NOs: 706-721; iii) a guide sequence at least 95%, 90%, or 85% identical to a sequence selected from SEQ ID NOs: 706-721; iv) a sequence that comprises 10 contiguous nucleotides±10 nucleotides of a genomic coordinate listed in Table 5A; v) at least 17, 18, 19, or 20 contiguous nucleotides of a sequence from (iv); or vi) a guide sequence that is at least 95%, 90%, or 85% identical to a sequence selected from (v); or
[1212] b. a nucleic acid encoding a gRNA of (a.).
[1213] Embodiment B3176. The method of any one of embodiments B173-B175, wherein the guide sequence comprises any one of SEQ ID NOs: 706-709.
[1214] Embodiment B177. The method of any one of embodiments B173-B175, wherein the guide sequence comprises any one of SEQ ID NOs: 706-708.
[1215] Embodiment B178. The method of any one of embodiments B173-B175, wherein the guide sequence comprises SEQ ID NO: 706.
[1216] Embodiment B179. The method of any one of embodiments B173-B175, wherein the guide sequence comprises SEQ ID NO: 707.
[1217] Embodiment B180. The method of any one of embodiments B173-B175, wherein the guide sequence comprises SEQ ID NO: 708.
[1218] Embodiment B181. A method of altering a DNA sequence within a TRBC1 and/or TRBC2 gene, comprising delivering a composition to a cell, wherein the composition comprises:
[1219] a. a gRNA comprising a guide sequence chosen from: i) SEQ ID NOs: 618-669; ii) at least 17, 18, 19, or 20 contiguous nucleotides of a sequence selected from SEQ ID NOs: 618-669; iii) a guide sequence at least 95%, 90%, or 85% identical to a sequence selected from SEQ ID NOs: 618-669; iv) a sequence that comprises 10 contiguous nucleotides±10 nucleotides of a genomic coordinate listed in Table 5B; v) at least 17, 18, 19, or 20 contiguous nucleotides of a sequence from (iv); or vi) a guide sequence that is at least 95%, 90%, or 85% identical to a sequence selected from (v); or
[1220] b. a nucleic acid encoding a guide RNA of (a.).
[1221] Embodiment B182. A method of reducing the expression of a TRBC1 and/or TRBC2 gene, comprising delivering a composition to a cell, wherein the composition comprises:
[1222] a. a gRNA comprising a guide sequence chosen from: i) SEQ ID NOs: 618-669; ii) at least 17, 18, 19, or 20 contiguous nucleotides of a sequence selected from SEQ ID NOs: 618-669; iii) a guide sequence at least 95%, 90%, or 85% identical to a sequence selected from SEQ ID NOs: 618-669; iv) a sequence that comprises 10 contiguous nucleotides±10 nucleotides of a genomic coordinate listed in Table 5B; v) at least 17, 18, 19, or 20 contiguous nucleotides of a sequence from (iv); or vi) a guide sequence that is at least 95%, 90%, or 85% identical to a sequence selected from (v); or
[1223] b. a nucleic acid encoding a guide RNA of (a.).
[1224] Embodiment B183. A method of immunotherapy comprising administering a composition comprising an engineered cell to a subject,
[1225] wherein the cell comprises a modification of at least one nucleotide within the genomic coordinates selected from: chr7: 142791757-142791777; chr7: 142801104-142801124; chr7: 142791811-142791831; chr7: 142801158-142801178; chr7: 142792728-142792748; chr7: 142791719-142791739; chr7: 142791766-142791786; chr7: 142801113-142801133; chr7: 142791928-142791948; chr7: 142801275-142801295; chr7: 142792062-142792082; chr7: 142801409-142801429; chr7: 142792713-142792733; chr7: 142802126-142802146; chr7: 142791808-142791828; chr7: 142801155-142801175; chr7: 142792003-142792023; chr7: 142801350-142801370; chr7: 142791760-142791780; chr7: 142791715-142791735; chr7: 142792781-142792801; chr7: 142792040-142792060; chr7: 142801387-142801407; chr7: 142791862-142791882; chr7: 142791716-142791736; chr7: 142791787-142791807; chr7: 142791759-142791779; chr7: 142801106-142801126; chr7: 142791807-142791827; chr7: 142801154-142801174; chr7: 142791879-142791899; chr7: 142801226-142801246; chr7: 142791805-142791825; chr7: 142791700-142791720; chr7: 142791765-142791785; chr7: 142801112-142801132; chr7: 142791820-142791840; chr7: 142791872-142791892; chr7: 142801219-142801239; chr7: 142791700-142791720; chr7: 142791806-142791826; chr7: 142801153-142801173; chr7: 142792035-142792055; chr7: 142792724-142792744; chr7: 142792754-142792774; chr7: 142791804-142791824; chr7: 142792684-142792704; chr7: 142791823-142791843; chr7: 142792728-142792748; chr7: 142792721-142792741; chr7: 142792749-142792769; chr7: 142792685-142792705; chr7: 142791816-142791836; chr7: 142801163-142801183; chr7: 142792686-142792706; chr7: 142791793-142791813; chr7: 142793110-142793130; chr7: 142791815-142791835; chr7: 142801162-142801182; chr7: 142792770-142792790; chr7: 142792047-142792067; chr7: 142801394-142801414; chr7: 142791871-142791891; chr7: 142801218-142801238; chr7: 142791894-142791914; chr7: 142792723-142792743; chr7: 142792724-142792744; chr7: 142791897-142791917; chr7: 142801244-142801264; chr7: 142792757-142792777; chr7: 142792740-142792760; chr7: 142792758-142792778; or
[1226] wherein the cell is engineered by delivering to a cell:
[1227] a. a gRNA comprising a guide sequence chosen from: i) SEQ ID NOs: 618-669; ii) at least 17, 18, 19, or 20 contiguous nucleotides of a sequence selected from SEQ ID NOs: 618-669; iii) a guide sequence at least 95%, 90%, or 85% identical to a sequence selected from SEQ ID NOs: 618-669; iv) a sequence that comprises 10 contiguous nucleotides±10 nucleotides of a genomic coordinate listed in Table 5B; v) at least 17, 18, 19, or 20 contiguous nucleotides of a sequence from (iv); or vi) a guide sequence that is at least 95%, 90%, or 85% identical to a sequence selected from (v); or
[1228] b. a nucleic acid encoding a guide RNA of (a.).
[1229] Embodiment B184. The method of any one of embodiments B181-B183, wherein the guide sequence comprises any one of SEQ ID NOs: 618-627.
[1230] Embodiment B3185. The method of any one of embodiments B181-B184, wherein the guide sequence comprises any one of SEQ ID NOs: 618-621.
[1231] Embodiment B186. The method of any one of embodiments B181-B185, wherein the guide sequence comprises SEQ ID NO: 618.
[1232] Embodiment B187. The method of any one of embodiments B181-B185, wherein the guide sequence comprises SEQ ID NO: 619.
[1233] Embodiment B188. The method of any one of embodiments B181-B185, wherein the guide sequence comprises SEQ ID NO: 620.
[1234] Embodiment B189. The method of any one of embodiments B181-B185, wherein the guide sequence comprises SEQ ID NO: 621.
[1235] Embodiment B190. The method of any one of embodiments B173-B189, wherein the composition further comprises the mRNA or composition of any one of the preceding embodiments relating to mRNA or compositions.
[1236] Embodiment B191. A composition comprising:
[1237] a. a gRNA comprising a guide sequence chosen from: i) SEQ ID NOs: 706-721; ii) at least 17, 18, 19, or 20 contiguous nucleotides of a sequence selected from SEQ ID NOs: 706-721; iii) a guide sequence at least 95%, 90%, or 85% identical to a sequence selected from SEQ ID NOs: 706-721; iv) a sequence that comprises 10 contiguous nucleotides±10 nucleotides of a genomic coordinate listed in Table 5A; v) at least 17, 18, 19, or 20 contiguous nucleotides of a sequence from (iv); or vi) a guide sequence that is at least 95%, 90%, or 85% identical to a sequence selected from (v); and optionally
[1238] b. the mRNA or composition of any one of the preceding embodiments relating to mRNA or compositions.
[1239] Embodiment B192. The composition of embodiment B191, wherein the guide sequence comprises any one of SEQ ID NOs: 706-709.
[1240] Embodiment B193. The composition of embodiment B191 or B192, for use in altering a DNA sequence within the TRAC gene in a cell.
[1241] Embodiment B194. The composition of any one of embodiments B191-B193 for use in reducing the expression of the TRAC gene in a cell.
[1242] Embodiment B195. The composition of any one of embodiments B191-B194, for use in immunotherapy of a subject.
[1243] Embodiment B196. A composition comprising:
[1244] a. a gRNA comprising a guide sequence chosen from: i) SEQ ID NOs: 618-669; ii) at least 17, 18, 19, or 20 contiguous nucleotides of a sequence selected from SEQ ID NOs: 618-669; iii) a guide sequence at least 95%, 90%, or 85% identical to a sequence selected from SEQ ID NOs: 618-669; iv) a sequence that comprises 10 contiguous nucleotides±10 nucleotides of a genomic coordinate listed in Table 5B; v) at least 17, 18, 19, or 20 contiguous nucleotides of a sequence from (iv); or vi) a guide sequence that is at least 95%, 90%, or 85% identical to a sequence selected from (v); and optionally
[1245] b. the mRNA or composition of any one of the preceding embodiments relating to mRNA or compositions.
[1246] Embodiment B197. The composition of embodiment B196, wherein the guide sequence comprises any one of SEQ ID NOs: 618-621.
[1247] Embodiment B198. The composition of embodiment B196 or B197, for use in altering a DNA sequence within the TRBC1 and/or TRBC2 gene in a cell.
[1248] Embodiment B199. The composition of any one of embodiments B196-B198 for use in reducing the expression of the TRBC1 and/or TRBC2 gene in a cell.
[1249] Embodiment B200. The composition of any one of embodiments B196-B199, for use in immunotherapy of a subject.
[1250] Embodiment B201. A cell, altered by the method of any one of embodiments B120-B121, and 161-178.
[1251] Embodiment B202. The cell according to embodiment B201, wherein the cell is altered ex vivo.
[1252] Embodiment B203. The cell according to embodiment B201 or B202, wherein the cell is a T cell.
[1253] Embodiment B204. The cell according to any of embodiments B201-B203, wherein the cell is a CD4⁺ or CD8⁺ T cell.
[1254] Embodiment B205. The cell according to any of embodiments B201-B204, wherein the cell is a mammalian, primate, or human cell.
[1255] Embodiment B206. The cell according to any of embodiments B201-B205, for use in immunotherapy of a subject.
[1256] Embodiment B207. An engineered cell which has reduced or eliminated surface expression of TRAC, comprising a genetic modification in a human TRAC gene, wherein the genetic modification comprises a modification of at least one nucleotide within the genomic coordinates selected from:
[1257] chr14: 22547596-22547616; chr14: 22550570-22550590; chr14: 22547763-22547783; chr14: 22550596-22550616; chr14: 22550566-22550586; chr14: 22547753-22547773; chr14: 22550601-22550621; chr14: 22550599-22550619; chr14: 22547583-22547603; chr14: 22547671-22547691; chr14: 22547770-22547790; chr14: 22547676-22547696; chr14: 22547772-22547792; chr14: 22547771-22547791; chr14: 22547733-22547753; chr14: 22547776-22547796.
[1258] Embodiment B208. An engineered cell which has reduced or eliminated surface expression of TRBC1/2, comprising a genetic modification in a human TRBC1/2 gene, wherein the genetic modification comprises a modification of at least one nucleotide within the genomic coordinates selected from:
[1259] chr7: 142791757-142791777; chr7: 142801104-142801124; chr7: 142791811-142791831; chr7: 142801158-142801178; chr7: 142792728-142792748; chr7: 142791719-142791739; chr7: 142791766-142791786; chr7: 142801113-142801133; chr7: 142791928-142791948; chr7: 142801275-142801295; chr7: 142792062-142792082; chr7: 142801409-142801429; chr7: 142792713-142792733; chr7: 142802126-142802146; chr7: 142791808-142791828; chr7: 142801155-142801175; chr7: 142792003-142792023; chr7: 142801350-142801370; chr7: 142791760-142791780; chr7: 142791715-142791735; chr7: 142792781-142792801; chr7: 142792040-142792060; chr7: 142801387-142801407; chr7: 142791862-142791882; chr7: 142791716-142791736; chr7: 142791787-142791807; chr7: 142791759-142791779; chr7: 142801106-142801126; chr7: 142791807-142791827; chr7: 142801154-142801174; chr7: 142791879-142791899; chr7: 142801226-142801246; chr7: 142791805-142791825; chr7: 142791700-142791720; chr7: 142791765-142791785; chr7: 142801112-142801132; chr7: 142791820-142791840; chr7: 142791872-142791892; chr7: 142801219-142801239; chr7: 142791700-142791720; chr7: 142791806-142791826; chr7: 142801153-142801173; chr7: 142792035-142792055; chr7: 142792724-142792744; chr7: 142792754-142792774; chr7: 142791804-142791824; chr7: 142792684-142792704; chr7: 142791823-142791843; chr7: 142792728-142792748; chr7: 142792721-142792741; chr7: 142792749-142792769; chr7: 142792685-142792705; chr7: 142791816-142791836; chr7: 142801163-142801183; chr7: 142792686-142792706; chr7: 142791793-142791813; chr7: 142793110-142793130; chr7: 142791815-142791835; chr7: 142801162-142801182; chr7: 142792770-142792790; chr7: 142792047-142792067; chr7: 142801394-142801414; chr7: 142791871-142791891; chr7: 142801218-142801238; chr7: 142791894-142791914; chr7: 142792723-142792743; chr7: 142792724-142792744; chr7: 142791897-142791917; chr7: 142801244-142801264; chr7: 142792757-142792777; chr7: 142792740-142792760; chr7: 142792758-142792778.
[1260] Embodiment B209. One or more lipid nucleic acid assembly compositions, optionally lipid nanoparticles, comprising:
[1261] (a) a first mRNA comprising a first open reading frame encoding a polypeptide comprising a cytidine deaminase and an RNA-guided nickase;
[1262] (b) a second mRNA comprising a second open reading frame encoding a uracil glycosylase inhibitor (UGI); and
[1263] (c) one or more guide RNAs.
[1264] Embodiment B210. The method, cell, or engineered cell of any one of the preceding embodiments, wherein the cell is an immune cell.
[1265] Embodiment B211. The method, cell, or engineered cell of any one of the preceding embodiments, wherein the cell is a lymphocyte.
[1266] Embodiment B212. The method, cell, or engineered cell of any one of the preceding embodiments, wherein the cell is a T cell.

LENGTHY TABLES
The patent application contains a lengthy table section. A copy of the table is available in electronic form from the USPTO web site (https://seqdata.uspto.gov/?pageRequest=docDetail&DocID=US20240002820A1). An electronic copy of the table will also be available from the USPTO upon request and payment of the fee set forth in 37 CFR 1.19(b)(3).

The application's sequence listing, which the Patent Office published only in electronic form, follows.

SEQUENCE LISTING (1163 sequences)

SEQ ID NO: 1 - RNA, 5342 nt, synthetic construct
  misc_feature 1..5342: note = Synthetic
  source 1..5342: mol_type = other RNA
gggaagctcagaataaacgctcaactttggccggatctgccaccatggaggcctcccccgcctccggcccccggcacctgatggacccccacatcttcacctccaacttcaacaacggcatcggccggcacaagacctacctgtgctacgaggtggagcggctggacaacggcacctccgtgaagatggaccagcaccggggcttcctgcacaaccaggccaagaacctgctgtgcggcttctacggccggcacgccgagctgcggttcctggacctggtgccctccctgcagctggaccccgcccagatctaccgggtgacctggttcatctcctggtccccctgcttctcctggggctgcgccggcgaggtgcgggccttcctgcaggagaacacccacgtgcggctgcggatcttcgccgcccggatctacgactacgaccccctgtacaaggaggccctgcagatgctgcgggacgccggcgcccaggtgtccatcatgacctacgacgagttcaagcactgctgggacaccttcgtggaccaccagggctgccccttccagccctgggacggcctggacgagcactcccaggccctgtccggccggctgcgggccatcctgcagaaccagggcaactccggctccgagacccccggcacctccgagtccgccacccccgagtccgacaagaagtactccatcggcctggccatcggcaccaactccgtgggctgggccgtgatcaccgacgagtacaaggtgccctccaagaagttcaaggtgctgggcaacaccgaccggcactccatcaagaagaacctgatcggcgccctgctgttcgactccggcgagaccgccgaggccacccggctgaagcggaccgcccggcggcggtacacccggcggaagaaccggatctgctacctgcaggagatcttctccaacgagatggccaaggtggacgactccttcttccaccggctggaggagtccttcctggtggaggaggacaagaagcacgagcggcaccccatcttcggcaacatcgtggacgaggtggcctaccacgagaagtaccccaccatctaccacctgcggaagaagctggtggactccaccgacaaggccgacctgcggctgatctacctggccctggcccacatgatcaagttccggggccacttcctgatcgagggcgacctgaaccccgacaactccgacgtggacaagctgttcatccagctggtgcagacctacaaccagctgttcgaggagaaccccatcaacgcctccggcgtggacgccaaggccatcctgtccgcccggctgtccaagtcccggcggctggagaacctgatcgcccagctgcccggcgagaagaagaacggcctgttcggcaacctgatcgccctgtccctgggcctgacccccaacttcaagtccaacttcgacctggccgaggacgccaagctgcagctgtccaaggacacctacgacgacgacctggacaacctgctggcccagatcggcgaccagtacgccgacctgttcctggccgccaagaacctgtccgacgccatcctgctgtccgacatcctgcgggtgaacaccgagatcaccaaggcccccctgtccgcctccatgatcaagcggtacgacgagcaccaccaggacctgaccctgctgaaggccctggtgcggcagcagctgcccgagaagtacaaggagatcttcttcgaccagtccaagaacggctacgccggctacatcgacggcggcgcctcccaggaggagttctacaagttcatcaagcccatcctggagaagatggacggcaccgaggagctgctggtgaagctgaaccgggaggacctgctgcggaagcagcggaccttcgacaacggctccatcccccaccagatccacctgggcgagctgcacgccatcctgcggcggcaggaggacttctaccccttcctgaaggacaaccgggagaagatcgagaagatcctgaccttccggatcccctactacgtgggccccctggcccggggcaactcccggttcgcctggatgacccggaagtccgaggagaccatcaccccctggaacttcgaggaggtggtggacaagggcgcctccgcccagtccttcatcgagcggatgaccaacttcgacaagaacctgcccaacgagaaggtgctgcccaagcactccctgctgtacgagtacttcaccgtgtacaacgagctgaccaaggtgaagtacgtgaccgagggcatgcggaagcccgccttcctgtccggcgagcagaagaaggccatcgtggacctgctgttcaagaccaaccggaaggtgaccgtgaagcagctgaaggaggactacttcaagaagatcgagtgcttcgactccgtggagatctccggcgtggaggaccggttcaacgcctccctgggcacctaccacgacctgctgaagatcatcaaggacaaggacttcctggacaacgaggagaacgaggacatcctggaggacatcgtgctgaccctgaccctgttcgaggaccgggagatgatcgaggagcggctgaagacctacgcccacctgttcgacgacaaggtgatgaagcagctgaagcggcggcggtacaccggctggggccggctgtcccggaagctgatcaacggcatccgggacaagcagtccggcaagaccatcctggacttcctgaagtccgacggcttcgccaaccggaacttcatgcagctgatccacgacgactccctgaccttcaaggaggacatccagaaggcccaggtgtccggccagggcgactccctgcacgagcacatcgccaacctggccggctcccccgccatcaagaagggcatcctgcagaccgtgaaggtggtggacgagctggtgaaggtgatgggccggcacaagcccgagaacatcgtgatcgagatggcccgggagaaccagaccacccagaagggccagaagaactcccgggagcggatgaagcggatcgaggagggcatcaaggagctgggctcccagatcctgaaggagcaccccgtggagaacacccagctgcagaacgagaagctgtacctgtactacctgcagaacggccgggacatgtacgtggaccaggagctggacatcaaccggctgtccgactacgacgtggaccacatcgtgccccagtccttcctgaaggacgactccatcgacaacaaggtgctgacccggtccgacaagaaccggggcaagtccgacaacgtgccctccgaggaggtggtgaagaagatgaagaactactggcggcagctgctgaacgccaagctgatcacccagcggaagttcgacaacctgaccaaggccgagcggggcggcctgtccgagctggacaaggccggcttcatcaagcggcagctggtggagacccggcagatcaccaagcacgtggcccagatcctggactcccggatgaacaccaagtacgacgagaacgacaagctgatccgggaggtgaaggtgatcaccctgaagtccaagctggtgtccgacttccggaaggacttccagttctacaaggtgcgggagatcaacaactaccaccacgcccacgacgcctacctgaacgccgtggtgggcaccgccctgatcaagaagtaccccaagctggagtccgagttcgtgtacggcgactacaaggtgtacgacgtgcggaagatgatcgccaagtccgagcaggagatcggcaaggccaccgccaagtacttcttctactccaacatcatgaacttcttcaagaccgagatcaccctggccaacggcgagatccggaagcggcccctgatcgagaccaacggcgagaccggcgagatcgtgtgggacaagggccgggacttcgccaccgtgcggaaggtgctgtccatgccccaggtgaacatcgtgaagaagaccgaggtgcagaccggcggcttctccaaggagtccatcctgcccaagcggaactccgacaagctgatcgcccggaagaaggactgggaccccaagaagtacggcggcttcgactcccccaccgtggcctactccgtgctggtggtggccaaggtggagaagggcaagtccaagaagctgaagtccgtgaaggagctgctgggcatcaccatcatggagcggtcctccttcgagaagaaccccatcgacttcctggaggccaagggctacaaggaggtgaagaaggacctgatcatcaagctgcccaagtactccctgttcgagctggagaacggccggaagcggatgctggcctccgccggcgagctgcagaagggcaacgagctggccctgccctccaagtacgtgaacttcctgtacctggcctcccactacgagaagctgaagggctcccccgaggacaacgagcagaagcagctgttcgtggagcagcacaagcactacctggacgagatcatcgagcagatctccgagttctccaagcgggtgatcctggccgacgccaacctggacaaggtgctgtccgcctacaacaagcaccgggacaagcccatccgggagcaggccgagaacatcatccacctgttcaccctgaccaacctgggcgcccccgccgccttcaagtacttcgacaccaccatcgaccggaagcggtacacctccaccaaggaggtgctggacgccaccctgatccaccagtccatcaccggcctgtacgagacccggatcgacctgtcccagctgggcggcgacggcggcggctcccccaagaagaagcggaaggtgtgactagcaccagcctcaagaacacccgaatggagtctctaagctacataataccaacttacactttacaaaatgttgtcccccaaaatgtagccattcgtatctgctcctaataaaaagaaagtttcttcacattctctcgagaaaaaaaaaaaatggaaaaaaaaaaaacggaaaaaaaaaaaaggtaaaaaaaaaaaatataaaaaaaaaaaacataaaaaaaaaaaacgaaaaaaaaaaaacgtaaaaaaaaaaaactcaaaaaaaaaaaagataaaaaaaaaaaacctaaaaaaaaaaaatgtaaaaaaaaaaaagggaaaaaaaaaaaacgcaaaaaaaaaaaacacaaaaaaaaaaaatgcaaaaaaaaaaaatcgaaaaaaaaaaaatctaaaaaaaaaaaacgaaaaaaaaaaaacccaaaaaaaaaaaagacaaaaaaaaaaaatagaaaaaaaaaaaagttaaaaaaaaaaaactgaaaaaaaaaaaatttaaaaaaaaaaaatctag

SEQ ID NO: 2 - RNA, 4782 nt, synthetic construct
  misc_feature 1..4782: note = Synthetic
  source 1..4782: mol_type = other RNA
atggaggcctcccccgcctccggcccccggcacctgatggacccccacatcttcacctccaacttcaacaacggcatcggccggcacaagacctacctgtgctacgaggtggagcggctggacaacggcacctccgtgaagatggaccagcaccggggcttcctgcacaaccaggccaagaacctgctgtgcggcttctacggccggcacgccgagctgcggttcctggacctggtgccctccctgcagctggaccccgcccagatctaccgggtgacctggttcatctcctggtccccctgcttctcctggggctgcgccggcgaggtgcgggccttcctgcaggagaacacccacgtgcggctgcggatcttcgccgcccggatctacgactacgaccccctgtacaaggaggccctgcagatgctgcgggacgccggcgcccaggtgtccatcatgacctacgacgagttcaagcactgctgggacaccttcgtggaccaccagggctgccccttccagccctgggacggcctggacgagcactcccaggccctgtccggccggctgcgggccatcctgcagaaccagggcaactccggctccgagacccccggcacctccgagtccgccacccccgagtccgacaagaagtactccatcggcctggccatcggcaccaactccgtgggctgggccgtgatcaccgacgagtacaaggtgccctccaagaagttcaaggtgctgggcaacaccgaccggcactccatcaagaagaacctgatcggcgccctgctgttcgactccggcgagaccgccgaggccacccggctgaagcggaccgcccggcggcggtacacccggcggaagaaccggatctgctacctgcaggagatcttctccaacgagatggccaaggtggacgactccttcttccaccggctggaggagtccttcctggtggaggaggacaagaagcacgagcggcaccccatcttcggcaacatcgtggacgaggtggcctaccacgagaagtaccccaccatctaccacctgcggaagaagctggtggactccaccgacaaggccgacctgcggctgatctacctggccctggcccacatgatcaagttccggggccacttcctgatcgagggcgacctgaaccccgacaactccgacgtggacaagctgttcatccagctggtgcagacctacaaccagctgttcgaggagaaccccatcaacgcctccggcgtggacgccaaggccatcctgtccgcccggctgtccaagtcccggcggctggagaacctgatcgcccagctgcccggcgagaagaagaacggcctgttcggcaacctgatcgccctgtccctgggcctgacccccaacttcaagtccaacttcgacctggccgaggacgccaagctgcagctgtccaaggacacctacgacgacgacctggacaacctgctggcccagatcggcgaccagtacgccgacctgttcctggccgccaagaacctgtccgacgccatcctgctgtccgacatcctgcgggtgaacaccgagatcaccaaggcccccctgtccgcctccatgatcaagcggtacgacgagcaccaccaggacctgaccctgctgaaggccctggtgcggcagcagctgcccgagaagtacaaggagatcttcttcgaccagtccaagaacggctacgccggctacatcgacggcggcgcctcccaggaggagttctacaagttcatcaagcccatcctggagaagatggacggcaccgaggagctgctggtgaagctgaaccgggaggacctgctgcggaagcagcggaccttcgacaacggctccatcccccaccagatccacctgggcgagctgcacgccatcctgcggcggcaggaggacttctaccccttcctgaaggacaaccgggagaagatcgagaagatcctgaccttccggatcccctactacgtgggccccctggcccggggcaactcccggttcgcctggatgacccggaagtccgaggagaccatcaccccctggaacttcgaggaggtggtggacaagggcgcctccgcccagtccttcatcgagcggatgaccaacttcgacaagaacctgcccaacgagaaggtgctgcccaagcactccctgctgtacgagtacttcaccgtgtacaacgagctgaccaaggtgaagtacgtgaccgagggcatgcggaagcccgccttcctgtccggcgagcagaagaaggccatcgtggacctgctgttcaagaccaaccggaaggtgaccgtgaagcagctgaaggaggactacttcaagaagatcgagtgcttcgactccgtggagatctccggcgtggaggaccggttcaacgcctccctgggcacctaccacgacctgctgaagatcatcaaggacaaggacttcctggacaacgaggagaacgaggacatcctggaggacatcgtgctgaccctgaccctgttcgaggaccgggagatgatcgaggagcggctgaagacctacgcccacctgttcgacgacaaggtgatgaagcagctgaagcggcggcggtacaccggctggggccggctgtcccggaagctgatcaacggcatccgggacaagcagtccggcaagaccatcctggacttcctgaagtccgacggcttcgccaaccggaacttcatgcagctgatccacgacgactccctgaccttcaaggaggacatccagaaggcccaggtgtccggccagggcgactccctgcacgagcacatcgccaacctggccggctcccccgccatcaagaagggcatcctgcagaccgtgaaggtggtggacgagctggtgaaggtgatgggccggcacaagcccgagaacatcgtgatcgagatggcccgggagaaccagaccacccagaagggccagaagaactcccgggagcggatgaagcggatcgaggagggcatcaaggagctgggctcccagatcctgaaggagcaccccgtggagaacacccagctgcagaacgagaagctgtacctgtactacctgcagaacggccgggacatgtacgtggaccaggagctggacatcaaccggctgtccgactacgacgtggaccacatcgtgccccagtccttcctgaaggacgactccatcgacaacaaggtgctgacccggtccgacaagaaccggggcaagtccgacaacgtgccctccgaggaggtggtgaagaagatgaagaactactggcggcagctgctgaacgccaagctgatcacccagcggaagttcgacaacctgaccaaggccgagcggggcggcctgtccgagctggacaaggccggcttcatcaagcggcagctggtggagacccggcagatcaccaagcacgtggcccagatcctggactcccggatgaacaccaagtacgacgagaacgacaagctgatccgggaggtgaaggtgatcaccctgaagtccaagctggtgtccgacttccggaaggacttccagttctacaaggtgcgggagatcaacaactaccaccacgcccacgacgcctacctgaacgccgtggtgggcaccgccctgatcaagaagtaccccaagctggagtccgagttcgtgtacggcgactacaaggtgtacgacgtgcggaagatgatcgccaagtccgagcaggagatcggcaaggccaccgccaagtacttcttctactccaacatcatgaacttcttcaagaccgagatcaccctggccaacggcgagatccggaagcggcccctgatcgagaccaacggcgagaccggcgagatcgtgtgggacaagggccgggacttcgccaccgtgcggaaggtgctgtccatgccccaggtgaacatcgtgaagaagaccgaggtgcagaccggcggcttctccaaggagtccatcctgcccaagcggaactccgacaagctgatcgcccggaagaaggactgggaccccaagaagtacggcggcttcgactcccccaccgtggcctactccgtgctggtggtggccaaggtggagaagggcaagtccaagaagctgaagtccgtgaaggagctgctgggcatcaccatcatggagcggtcctccttcgagaagaaccccatcgacttcctggaggccaagggctacaaggaggtgaagaaggacctgatcatcaagctgcccaagtactccctgttcgagctggagaacggccggaagcggatgctggcctccgccggcgagctgcagaagggcaacgagctggccctgccctccaagtacgtgaacttcctgtacctggcctcccactacgagaagctgaagggctcccccgaggacaacgagcagaagcagctgttcgtggagcagcacaagcactacctggacgagatcatcgagcagatctccgagttctccaagcgggtgatcctggccgacgccaacctggacaaggtgctgtccgcctacaacaagcaccgggacaagcccatccgggagcaggccgagaacatcatccacctgttcaccctgaccaacctgggcgcccccgccgccttcaagtacttcgacaccaccatcgaccggaagcggtacacctccaccaaggaggtgctggacgccaccctgatccaccagtccatcaccggcctgtacgagacccggatcgacctgtcccagctgggcggcgacggcggcggctcccccaagaagaagcggaaggtgtga

SEQ ID NO: 3 - protein, 1593 aa, synthetic construct
  REGION 1..1593: note = Synthetic
MEASPASGPRHLMDPHIFTSNFNNGIGRHKTYLCYEVERLDNGTSVKMDQHRGFLHNQAKNLLCGFYGRHAELRFLDLVPSLQLDPAQIYRVTWFISWSPCFSWGCAGEVRAFLQENTHVRLRIFAARIYDYDPLYKEALQMLRDAGAQVSIMTYDEFKHCWDTFVDHQGCPFQPWDGLDEHSQALSGRLRAILQNQGNSGSETPGTSESATPESDKKYSIGLAIGTNSVGWAVITDEYKVPSKKFKVLGNTDRHSIKKNLIGALLFDSGETAEATRLKRTARRRYTRRKNRICYLQEIFSNEMAKVDDSFFHRLEESFLVEEDKKHERHPIFGNIVDEVAYHEKYPTIYHLRKKLVDSTDKADLRLIYLALAHMIKFRGHFLIEGDLNPDNSDVDKLFIQLVQTYNQLFEENPINASGVDAKAILSARLSKSRRLENLIAQLPGEKKNGLFGNLIALSLGLTPNFKSNFDLAEDAKLQLSKDTYDDDLDNLLAQIGDQYADLFLAAKNLSDAILLSDILRVNTEITKAPLSASMIKRYDEHHQDLTLLKALVRQQLPEKYKEIFFDQSKNGYAGYIDGGASQEEFYKFIKPILEKMDGTEELLVKLNREDLLRKQRTFDNGSIPHQIHLGELHAILRRQEDFYPFLKDNREKIEKILTFRIPYYVGPLARGNSRFAWMTRKSEETITPWNFEEVVDKGASAQSFIERMTNFDKNLPNEKVLPKHSLLYEYFTVYNELTKVKYVTEGMRKPAFLSGEQKKAIVDLLFKTNRKVTVKQLKEDYFKKIECFDSVEISGVEDRFNASLGTYHDLLKIIKDKDFLDNEENEDILEDIVLTLTLFEDREMIEERLKTYAHLFDDKVMKQLKRRRYTGWGRLSRKLINGIRDKQSGKTILDFLKSDGFANRNFMQLIHDDSLTFKEDIQKAQVSGQGDSLHEHIANLAGSPAIKKGILQTVKVVDELVKVMGRHKPENIVIEMARENQTTQKGQKNSRERMKRIEEGIKELGSQILKEHPVENTQLQNEKLYLYYLQNGRDMYVDQELDINRLSDYDVDHIVPQSFLKDDSIDNKVLTRSDKNRGKSDNVPSEEVVKKMKNYWRQLLNAKLITQRKFDNLTKAERGGLSELDKAGFIKRQLVETRQITKHVAQILDSRMNTKYDENDKLIREVKVITLKSKLVSDFRKDFQFYKVREINNYHHAHDAYLNAVVGTALIKKYPKLESEFVYGDYKVYDVRKMIAKSEQEIGKATAKYFFYSNIMNFFKTEITLANGEIRKRPLIETNGETGEIVWDKGRDFATVRKVLSMPQVNIVKKTEVQTGGFSKESILPKRNSDKLIARKKDWDPKKYGGFDSPTVAYSVLVVAKVEKGKSKKLKSVKELLGITIMERSSFEKNPIDFLEAKGYKEVKKDLIIKLPKYSLFELENGRKRMLASAGELQKGNELALPSKYVNFLYLASHYEKLKGSPEDNEQKQLFVEQHKHYLDEIIEQISEFSKRVILADANLDKVLSAYNKHRDKPIREQAENIIHLFTLTNLGAPAAFKYFDTTIDRKRYTSTKEVLDATLIHQSITGLYETRIDLSQLGGDGGGSPKKKRKV

SEQ ID NO: 4 - RNA, 5399 nt, synthetic construct
  misc_feature 1..5399: note = Synthetic
  source 1..5399: mol_type = other RNA
gggaagctcagaataaacgctcaactttggccggatctgccaccatggaggcctcccccgcctccggcccccggcacctgatggacccccacatcttcacctccaacttcaacaacggcatcggccggcacaagacctacctgtgctacgaggtggagcggctggacaacggcacctccgtgaagatggaccagcaccggggcttcctgcacaaccaggccaagaacctgctgtgcggcttctacggccggcacgccgagctgcggttcctggacctggtgccctccctgcagctggaccccgcccagatctaccgggtgacctggttcatctcctggtccccctgcttctcctggggctgcgccggcgaggtgcgggccttcctgcaggagaacacccacgtgcggctgcggatcttcgccgcccggatctacgactacgaccccctgtacaaggaggccctgcagatgctgcgggacgccggcgcccaggtgtccatcatgacctacgacgagttcaagcactgctgggacaccttcgtggaccaccagggctgccccttccagccctgggacggcctggacgagcactcccaggccctgtccggccggctgcgggccatcctgcagaaccagggcaactccggctccgagacccccggcacctccgagtccgccacccccgagtccgacaagaagtactccatcggcctggccatcggcaccaactccgtgggctgggccgtgatcaccgacgagtacaaggtgccctccaagaagttcaaggtgctgggcaacaccgaccggcactccatcaagaagaacctgatcggcgccctgctgttcgactccggcgagaccgccgaggccacccggctgaagcggaccgcccggcggcggtacacccggcggaagaaccggatctgctacctgcaggagatcttctccaacgagatggccaaggtggacgactccttcttccaccggctggaggagtccttcctggtggaggaggacaagaagcacgagcggcaccccatcttcggcaacatcgtggacgaggtggcctaccacgagaagtaccccaccatctaccacctgcggaagaagctggtggactccaccgacaaggccgacctgcggctgatctacctggccctggcccacatgatcaagttccggggccacttcctgatcgagggcgacctgaaccccgacaactccgacgtggacaagctgttcatccagctggtgcagacctacaaccagctgttcgaggagaaccccatcaacgcctccggcgtggacgccaaggccatcctgtccgcccggctgtccaagtcccggcggctggagaacctgatcgcccagctgcccggcgagaagaagaacggcctgttcggcaacctgatcgccctgtccctgggcctgacccccaacttcaagtccaacttcgacctggccgaggacgccaagctgcagctgtccaaggacacctacgacgacgacctggacaacctgctggcccagatcggcgaccagtacgccgacctgttcctggccgccaagaacctgtccgacgccatcctgctgtccgacatcctgcgggtgaacaccgagatcaccaaggcccccctgtccgcctccatgatcaagcggtacgacgagcaccaccaggacctgaccctgctgaaggccctggtgcggcagcagctgcccgagaagtacaaggagatcttcttcgaccagtccaagaacggctacgccggctacatcgacggcggcgcctcccaggaggagttctacaagttcatcaagcccatcctggagaagatggacggcaccgaggagctgctggtgaagctgaaccgggaggacctgctgcggaagcagcggaccttcgacaacggctccatcccccaccagatccacctgggcgagctgcacgccatcctgcggcggcaggaggacttctaccccttcctgaaggacaaccgggagaagatcgagaagatcctgaccttccggatcccctactacgtgggccccctggcccggggcaactcccggttcgcctggatgacccggaagtccgaggagaccatcaccccctggaacttcgaggaggtggtggacaagggcgcctccgcccagtccttcatcgagcggatgaccaacttcgacaagaacctgcccaacgagaaggtgctgcccaagcactccctgctgtacgagtacttcaccgtgtacaacgagctgaccaaggtgaagtacgtgaccgagggcatgcggaagcccgccttcctgtccggcgagcagaagaaggccatcgtggacctgctgttcaagaccaaccggaaggtgaccgtgaagcagctgaaggaggactacttcaagaagatcgagtgcttcgactccgtggagatctccggcgtggaggaccggttcaacgcctccctgggcacctaccacgacctgctgaagatcatcaaggacaaggacttcctggacaacgaggagaacgaggacatcctggaggacatcgtgctgaccctgaccctgttcgaggaccgggagatgatcgaggagcggctgaagacctacgcccacctgttcgacgacaaggtgatgaagcagctgaagcggcggcggtacaccggctggggccggctgtcccggaagctgatcaacggcatccgggacaagcagtccggcaagaccatcctggacttcctgaagtccgacggcttcgccaaccggaacttcatgcagctgatccacgacgactccctgaccttcaaggaggacatccagaaggcccaggtgtccggccagggcgactccctgcacgagcacatcgccaacctggccggctcccccgccatcaagaagggcatcctgcagaccgtgaaggtggtggacgagctggtgaaggtgatgggccggcacaagcccgagaacatcgtgatcgagatggcccgggagaaccagaccacccagaagggccagaagaactcccgggagcggatgaagcggatcgaggagggcatcaaggagctgggctcccagatcctgaaggagcaccccgtggagaacacccagctgcagaacgagaagctgtacctgtactacctgcagaacggccgggacatgtacgtggaccaggagctggacatcaaccggctgtccgactacgacgtggaccacatcgtgccccagtccttcctgaaggacgactccatcgacaacaaggtgctgacccggtccgacaagaaccggggcaagtccgacaacgtgccctccgaggaggtggtgaagaagatgaagaactactggcggcagctgctgaacgccaagctgatcacccagcggaagttcgacaacctgaccaaggccgagcggggcggcctgtccgagctggacaaggccggcttcatcaagcggcagctggtggagacccggcagatcaccaagcacgtggcccagatcctggactcccggatgaacaccaagtacgacgagaacgacaagctgatccgggaggtgaaggtgatcaccctgaagtccaagctggtgtccgacttccggaaggacttccagttctacaaggtgcgggagatcaacaactaccaccacgcccacgacgcctacctgaacgccgtggtgggcaccgccctgatcaagaagtaccccaagctggagtccgagttcgtgtacggcgactacaaggtgtacgacgtgcggaagatgatcgccaagtccgagcaggagatcggcaaggccaccgccaagtacttcttctactccaacatcatgaacttcttcaagaccgagatcaccctggccaacggcgagatccggaagcggcccctgatcgagaccaacggcgagaccggcgagatcgtgtgggacaagggccgggacttcgccaccgtgcggaaggtgctgtccatgccccaggtgaacatcgtgaagaagaccgaggtgcagaccggcggcttctccaaggagtccatcctgcccaagcggaactccgacaagctgatcgcccggaagaaggactgggaccccaagaagtacggcggcttcgactcccccaccgtggcctactccgtgctggtggtggccaaggtggagaagggcaagtccaagaagctgaagtccgtgaaggagctgctgggcatcaccatcatggagcggtcctccttcgagaagaaccccatcgacttcctggaggccaagggctacaaggaggtgaagaaggacctgatcatcaagctgcccaagtactccctgttcgagctggagaacggccggaagcggatgctggcctccgccggcgagctgcagaagggcaacgagctggccctgccctccaagtacgtgaacttcctgtacctggcctcccactacgagaagctgaagggctcccccgaggacaacgagcagaagcagctgttcgtggagcagcacaagcactacctggacgagatcatcgagcagatctccgagttctccaagcgggtgatcctggccgacgccaacctggacaaggtgctgtccgcctacaacaagcaccgggacaagcccatccgggagcaggccgagaacatcatccacctgttcaccctgaccaacctgggcgcccccgccgccttcaagtacttcgacaccaccatcgaccggaagcggtacacctccaccaaggaggtgctggacgccaccctgatccaccagtccatcaccggcctgtacgagacccggatcgacctgtcccagctgggcggcgacggcggcggctcccccaagaagaagcggaaggtgtccgagtccgccacccccgagtccgtgtccggctggcggctgttcaagaagatctcctgactagcaccagcctcaagaacacccgaatggagtctctaagctacataataccaacttacactttacaaaatgttgtcccccaaaatgtagccattcgtatctgctcctaataaaaagaaagtttcttcacattctctcgagaaaaaaaaaaaatggaaaaaaaaaaaacggaaaaaaaaaaaaggtaaaaaaaaaaaatataaaaaaaaaaaacataaaaaaaaaaaacgaaaaaaaaaaaacgtaaaaaaaaaaaactcaaaaaaaaaaaagataaaaaaaaaaaacctaaaaaaaaaaaatgtaaaaaaaaaaaagggaaaaaaaaaaaacgcaaaaaaaaaaaacacaaaaaaaaaaaatgcaaaaaaaaaaaatcgaaaaaaaaaaaatctaaaaaaaaaaaacgaaaaaaaaaaaacccaaaaaaaaaaaagacaaaaaaaaaaaatagaaaaaaaaaaaagttaaaaaaaaaaaactgaaaaaaaaaaaatttaaaaaaaaaaaatctag

SEQ ID NO: 5 - RNA, 4839 nt, synthetic construct
  misc_feature 1..4839: note = Synthetic
  source 1..4839: mol_type = other RNA
atggaggcctcccccgcctccggcccccggcacctgatggacccccacatcttcacctccaacttcaacaacggcatcggccggcacaagacctacctgtgctacgaggtggagcggctggacaacggcacctccgtgaagatggaccagcaccggggcttcctgcacaaccaggccaagaacctgctgtgcggcttctacggccggcacgccgagctgcggttcctggacctggtgccctccctgcagctggaccccgcccagatctaccgggtgacctggttcatctcctggtccccctgcttctcctggggctgcgccggcgaggtgcgggccttcctgcaggagaacacccacgtgcggctgcggatcttcgccgcccggatctacgactacgaccccctgtacaaggaggccctgcagatgctgcgggacgccggcgcccaggtgtccatcatgacctacgacgagttcaagcactgctgggacaccttcgtggaccaccagggctgccccttccagccctgggacggcctggacgagcactcccaggccctgtccggccggctgcgggccatcctgcagaaccagggcaactccggctccgagacccccggcacctccgagtccgccacccccgagtccgacaagaagtactccatcggcctggccatcggcaccaactccgtgggctgggccgtgatcaccgacgagtacaaggtgccctccaagaagttcaaggtgctgggcaacaccgaccggcactccatcaagaagaacctgatcggcgccctgctgttcgactccggcgagaccgccgaggccacccggctgaagcggaccgcccggcggcggtacacccggcggaagaaccggatctgctacctgcaggagatcttctccaacgagatggccaaggtggacgactccttcttccaccggctggaggagtccttcctggtggaggaggacaagaagcacgagcggcaccccatcttcggcaacatcgtggacgaggtggcctaccacgagaagtaccccaccatctaccacctgcggaagaagctggtggactccaccgacaaggccgacctgcggctgatctacctggccctggcccacatgatcaagttccggggccacttcctgatcgagggcgacctgaaccccgacaactccgacgtggacaagctgttcatccagctggtgcagacctacaaccagctgttcgaggagaaccccatcaacgcctccggcgtggacgccaaggccatcctgtccgcccggctgtccaagtcccggcggctggagaacctgatcgcccagctgcccggcgagaagaagaacggcctgttcggcaacctgatcgccctgtccctgggcctgacccccaacttcaagtccaacttcgacctggccgaggacgccaagctgcagctgtccaaggacacctacgacgacgacctggacaacctgctggcccagatcggcgaccagtacgccgacctgttcctggccgccaagaacctgtccgacgccatcctgctgtccgacatcctgcgggtgaacaccgagatcaccaaggcccccctgtccgcctccatgatcaagcggtacgacgagcaccaccaggacctgaccctgctgaaggccctggtgcggcagcagctgcccgagaagtacaaggagatcttcttcgaccagtccaagaacggctacgccggctacatcgacggcggcgcctcccaggaggagttctacaagttcatcaagcccatcctggagaagatggacggcaccgaggagctgctggtgaagctgaaccgggaggacctgctgcggaagcagcggaccttcgacaacggctccatcccccaccagatccacctgggcgagctgcacgccatcctgcggcggcaggaggacttctaccccttcctgaaggacaaccgggagaagatcgagaagatcctgaccttccggatcccctactacgtgggccccctggcccggggcaactcccggttcgcctggatgacccggaagtccgaggagaccatcaccccctggaacttcgaggaggtggtggacaagggcgcctccgcccagtccttcatcgagcggatgaccaacttcgacaagaacctgcccaacgagaaggtgctgcccaagcactccctgctgtacgagtacttcaccgtgtacaacgagctgaccaaggtgaagtacgtgaccgagggcatgcggaagcccgccttcctgtccggcgagcagaagaaggccatcgtggacctgctgttcaagaccaaccggaaggtgaccgtgaagcagctgaaggaggactacttcaagaagatcgagtgcttcgactccgtggagatctccggcgtggaggaccggttcaacgcctccctgggcacctaccacgacctgctgaagatcatcaaggacaaggacttcctggacaacgaggagaacgaggacatcctggaggacatcgtgctgaccctgaccctgttcgaggaccgggagatgatcgaggagcggctgaagacctacgcccacctgttcgacgacaaggtgatgaagcagctgaagcggcggcggtacaccggctggggccggctgtcccggaagctgatcaacggcatccgggacaagcagtccggcaagaccatcctggacttcctgaagtccgacggcttcgccaaccggaacttcatgcagctgatccacgacgactccctgaccttcaaggaggacatccagaaggcccaggtgtccggccagggcgactccctgcacgagcacatcgccaacctggccggctcccccgccatcaagaagggcatcctgcagaccgtgaaggtggtggacgagctggtgaaggtgatgggccggcacaagcccgagaacatcgtgatcgagatggcccgggagaaccagaccacccagaagggccagaagaactcccgggagcggatgaagcggatcgaggagggcatcaaggagctgggctcccagatcctgaaggagcaccccgtggagaacacccagctgcagaacgagaagctgtacctgtactacctgcagaacggccgggacatgtacgtggaccaggagctggacatcaaccggctgtccgactacgacgtggaccacatcgtgccccagtccttcctgaaggacgactccatcgacaacaaggtgctgacccggtccgacaagaaccggggcaagtccgacaacgtgccctccgaggaggtggtgaagaagatgaagaactactggcggcagctgctgaacgccaagctgatcacccagcggaagttcgacaacctgaccaaggccgagcggggcggcctgtccgagctggacaaggccggcttcatcaagcggcagctggtggagacccggcagatcaccaagcacgtggcccagatcctggactcccggatgaacaccaagtacgacgagaacgacaagctgatccgggaggtgaaggtgatcaccctgaagtccaagctggtgtccgacttccggaaggacttccagttctacaaggtgcgggagatcaacaactaccaccacgcccacgacgcctacctgaacgccgtggtgggcaccgccctgatcaagaagtaccccaagctggagtccgagttcgtgtacggcgactacaaggtgtacgacgtgcggaagatgatcgccaagtccgagcaggagatcggcaaggccaccgccaagtacttcttctactccaacatcatgaacttcttcaagaccgagatcaccctggccaacggcgagatccggaagcggcccctgatcgagaccaacggcgagaccggcgagatcgtgtgggacaagggccgggacttcgccaccgtgcggaaggtgctgtccatgccccaggtgaacatcgtgaagaagaccgaggtgcagaccggcggcttctccaaggagtccatcctgcccaagcggaactccgacaagctgatcgcccggaagaaggactgggaccccaagaagtacggcggcttcgactcccccaccgtggcctactccgtgctggtggtggccaaggtggagaagggcaagtccaagaagctgaagtccgtgaaggagctgctgggcatcaccatcatggagcggtcctccttcgagaagaaccccatcgacttcctggaggccaagggctacaaggaggtgaagaaggacctgatcatcaagctgcccaagtactccctgttcgagctggagaacggccggaagcggatgctggcctccgccggcgagctgcagaagggcaacgagctggccctgccctccaagtacgtgaacttcctgtacctggcctcccactacgagaagctgaagggctcccccgaggacaacgagcagaagcagctgttcgtggagcagcacaagcactacctggacgagatcatcgagcagatctccgagttctccaagcgggtgatcctggccgacgccaacctggacaaggtgctgtccgcctacaacaagcaccgggacaagcccatccgggagcaggccgagaacatcatccacctgttcaccctgaccaacctgggcgcccccgccgccttcaagtacttcgacaccaccatcgaccggaagcggtacacctccaccaaggaggtgctggacgccaccctgatccaccagtccatcaccggcctgtacgagacccggatcgacctgtcccagctgggcggcgacggcggcggctcccccaagaagaagcggaaggtgtccgagtccgccacccccgagtccgtgtccggctggcggctgttcaagaagatctcctga

SEQ ID NO: 6 - protein, 1612 aa, synthetic construct
  REGION 1..1612: note = Synthetic
MEASPASGPRHLMDPHIFTSNFNNGIGRHKTYLCYEVERLDNGTSVKMDQHRGFLHNQAKNLLCGFYGRHAELRFLDLVPSLQLDPAQIYRVTWFISWSPCFSWGCAGEVRAFLQENTHVRLRIFAARIYDYDPLYKEALQMLRDAGAQVSIMTYDEFKHCWDTFVDHQGCPFQPWDGLDEHSQALSGRLRAILQNQGNSGSETPGTSESATPESDKKYSIGLAIGTNSVGWAVITDEYKVPSKKFKVLGNTDRHSIKKNLIGALLFDSGETAEATRLKRTARRRYTRRKNRICYLQEIFSNEMAKVDDSFFHRLEESFLVEEDKKHERHPIFGNIVDEVAYHEKYPTIYHLRKKLVDSTDKADLRLIYLALAHMIKFRGHFLIEGDLNPDNSDVDKLFIQLVQTYNQLFEENPINASGVDAKAILSARLSKSRRLENLIAQLPGEKKNGLFGNLIALSLGLTPNFKSNFDLAEDAKLQLSKDTYDDDLDNLLAQIGDQYADLFLAAKNLSDAILLSDILRVNTEITKAPLSASMIKRYDEHHQDLTLLKALVRQQLPEKYKEIFFDQSKNGYAGYIDGGASQEEFYKFIKPILEKMDGTEELLVKLNREDLLRKQRTFDNGSIPHQIHLGELHAILRRQEDFYPFLKDNREKIEKILTFRIPYYVGPLARGNSRFAWMTRKSEETITPWNFEEVVDKGASAQSFIERMTNFDKNLPNEKVLPKHSLLYEYFTVYNELTKVKYVTEGMRKPAFLSGEQKKAIVDLLFKTNRKVTVKQLKEDYFKKIECFDSVEISGVEDRFNASLGTYHDLLKIIKDKDFLDNEENEDILEDIVLTLTLFEDREMIEERLKTYAHLFDDKVMKQLKRRRYTGWGRLSRKLINGIRDKQSGKTILDFLKSDGFANRNFMQLIHDDSLTFKEDIQKAQVSGQGDSLHEHIANLAGSPAIKKGILQTVKVVDELVKVMGRHKPENIVIEMARENQTTQKGQKNSRERMKRIEEGIKELGSQILKEHPVENTQLQNEKLYLYYLQNGRDMYVDQELDINRLSDYDVDHIVPQSFLKDDSIDNKVLTRSDKNRGKSDNVPSEEVVKKMKNYWRQLLNAKLITQRKFDNLTKAERGGLSELDKAGFIKRQLVETRQITKHVAQILDSRMNTKYDENDKLIREVKVITLKSKLVSDFRKDFQFYKVREINNYHHAHDAYLNAVVGTALIKKYPKLESEFVYGDYKVYDVRKMIAKSEQEIGKATAKYFFYSNIMNFFKTEITLANGEIRKRPLIETNGETGEIVWDKGRDFATVRKVLSMPQVNIVKKTEVQTGGFSKESILPKRNSDKLIARKKDWDPKKYGGFDSPTVAYSVLVVAKVEKGKSKKLKSVKELLGITIMERSSFEKNPIDFLEAKGYKEVKKDLIIKLPKYSLFELENGRKRMLASAGELQKGNELALPSKYVNFLYLASHYEKLKGSPEDNEQKQLFVEQHKHYLDEIIEQISEFSKRVILADANLDKVLSAYNKHRDKPIREQAENIIHLFTLTNLGAPAAFKYFDTTIDRKRYTSTKEVLDATLIHQSITGLYETRIDLSQLGGDGGGSPKKKRKVSESATPESVSGWRLFKKIS

SEQ ID NO: 7 - skipped

SEQ ID NO: 8 - RNA, 4140 nt, synthetic construct
  misc_feature 1..4140: note = Synthetic
  source 1..4140: mol_type = other RNA
atggacaagaagtacagcatcggactggacatcggaacaaacagcgtcggatgggcagtcatcacagacgaatacaaggtcccgagcaagaagttcaaggtcctgggaaacacagacagacacagcatcaagaagaacctgatcggagcactgctgttcgacagcggagaaacagcagaagcaacaagactgaagagaacagcaagaagaagatacacaagaagaaagaacagaatctgctacctgcaggaaatcttcagcaacgaaatggcaaaggtcgacgacagcttcttccacagactggaagaaagcttcctggtcgaagaagacaagaagcacgaaagacacccgatcttcggaaacatcgtcgacgaagtcgcataccacgaaaagtacccgacaatctaccacctgagaaagaagctggtcgacagcacagacaaggcagacctgagactgatctacctggcactggcacacatgatcaagttcagaggacacttcctgatcgaaggagacctgaacccggacaacagcgacgtcgacaagctgttcatccagctggtccagacatacaaccagctgttcgaagaaaacccgatcaacgcaagcggagtcgacgcaaaggcaatcctgagcgcaagactgagcaagagcagaagactggaaaacctgatcgcacagctgccgggagaaaagaagaacggactgttcggaaacctgatcgcactgagcctgggactgacaccgaacttcaagagcaacttcgacctggcagaagacgcaaagctgcagctgagcaaggacacatacgacgacgacctggacaacctgctggcacagatcggagaccagtacgcagacctgttcctggcagcaaagaacctgagcgacgcaatcctgctgagcgacatcctgagagtcaacacagaaatcacaaaggcaccgctgagcgcaagcatgatcaagagatacgacgaacaccaccaggacctgacactgctgaaggcactggtcagacagcagctgccggaaaagtacaaggaaatcttcttcgaccagagcaagaacggatacgcaggatacatcgacggaggagcaagccaggaagaattctacaagttcatcaagccgatcctggaaaagatggacggaacagaagaactgctggtcaagctgaacagagaagacctgctgagaaagcagagaacattcgacaacggaagcatcccgcaccagatccacctgggagaactgcacgcaatcctgagaagacaggaagacttctacccgttcctgaaggacaacagagaaaagatcgaaaagatcctgacattcagaatcccgtactacgtcggaccgctggcaagaggaaacagcagattcgcatggatgacaagaaagagcgaagaaacaatcacaccgtggaacttcgaagaagtcgtcgacaagggagcaagcgcacagagcttcatcgaaagaatgacaaacttcgacaagaacctgccgaacgaaaaggtcctgccgaagcacagcctgctgtacgaatacttcacagtctacaacgaactgacaaaggtcaagtacgtcacagaaggaatgagaaagccggcattcctgagcggagaacagaagaaggcaatcgtcgacctgctgttcaagacaaacagaaaggtcacagtcaagcagctgaaggaagactacttcaagaagatcgaatgcttcgacagcgtcgaaatcagcggagtcgaagacagattcaacgcaagcctgggaacataccacgacctgctgaagatcatcaaggacaaggacttcctggacaacgaagaaaacgaagacatcctggaagacatcgtcctgacactgacactgttcgaagacagagaaatgatcgaagaaagactgaagacatacgcacacctgttcgacgacaaggtcatgaagcagctgaagagaagaagatacacaggatggggaagactgagcagaaagctgatcaacggaatcagagacaagcagagcggaaagacaatcctggacttcctgaagagcgacggattcgcaaacagaaacttcatgcagctgatccacgacgacagcctgacattcaaggaagacatccagaaggcacaggtcagcggacagggagacagcctgcacgaacacatcgcaaacctggcaggaagcccggcaatcaagaagggaatcctgcagacagtcaaggtcgtcgacgaactggtcaaggtcatgggaagacacaagccggaaaacatcgtcatcgaaatggcaagagaaaaccagacaacacagaagggacagaagaacagcagagaaagaatgaagagaatcgaagaaggaatcaaggaactgggaagccagatcctgaaggaacacccggtcgaaaacacacagctgcagaacgaaaagctgtacctgtactacctgcagaacggaagagacatgtacgtcgaccaggaactggacatcaacagactgagcgactacgacgtcgaccacatcgtcccgcagagcttcctgaaggacgacagcatcgacaacaaggtcctgacaagaagcgacaagaacagaggaaagagcgacaacgtcccgagcgaagaagtcgtcaagaagatgaagaactactggagacagctgctgaacgcaaagctgatcacacagagaaagttcgacaacctgacaaaggcagagagaggaggactgagcgaactggacaaggcaggattcatcaagagacagctggtcgaaacaagacagatcacaaagcacgtcgcacagatcctggacagcagaatgaacacaaagtacgacgaaaacgacaagctgatcagagaagtcaaggtcatcacactgaagagcaagctggtcagcgacttcagaaaggacttccagttctacaaggtcagagaaatcaacaactaccaccacgcacacgacgcatacctgaacgcagtcgtcggaacagcactgatcaagaagtacccgaagctggaaagcgaattcgtctacggagactacaaggtctacgacgtcagaaagatgatcgcaaagagcgaacaggaaatcggaaaggcaacagcaaagtacttcttctacagcaacatcatgaacttcttcaagacagaaatcacactggcaaacggagaaatcagaaagagaccgctgatcgaaacaaacggagaaacaggagaaatcgtctgggacaagggaagagacttcgcaacagtcagaaaggtcctgagcatgccgcaggtcaacatcgtcaagaagacagaagtccagacaggaggattcagcaaggaaagcatcctgccgaagagaaacagcgacaagctgatcgcaagaaagaaggactgggacccgaagaagtacggaggattcgacagcccgacagtcgcatacagcgtcctggtcgtcgcaaaggtcgaaaagggaaagagcaagaagctgaagagcgtcaaggaactgctgggaatcacaatcatggaaagaagcagcttcgaaaagaacccgatcgacttcctggaagcaaagggatacaaggaagtcaagaaggacctgatcatcaagctgccgaagtacagcctgttcgaactggaaaacggaagaaagagaatgctggcaagcgcaggagaactgcagaagggaaacgaactggcactgccgagcaagtacgtcaacttcctgtacctggcaagccactacgaaaagctgaagggaagcccggaagacaacgaacagaagcagctgttcgtcgaacagcacaagcactacctggacgaaatcatcgaacagatcagcgaattcagcaagagagtcatcctggcagacgcaaacctggacaaggtcctgagcgcatacaacaagcacagagacaagccgatcagagaacaggcagaaaacatcatccacctgttcacactgacaaacctgggagcaccggcagcattcaagtacttcgacacaacaatcgacagaaagagatacacaagcacaaaggaagtcctggacgcaacactgatccaccagagcatcacaggactgtacgaaacaagaatcgacctgagccagctgggaggagacggaggaggaagcccgaagaagaagagaaaggtctag

SEQ ID NO: 9 - protein, 1379 aa, synthetic construct
  REGION 1..1379: note = Synthetic
MDKKYSIGLDIGTNSVGWAVITDEYKVPSKKFKVLGNTDRHSIKKNLIGALLFDSGETAEATRLKRTARRRYTRRKNRICYLQEIFSNEMAKVDDSFFHRLEESFLVEEDKKHERHPIFGNIVDEVAYHEKYPTIYHLRKKLVDSTDKADLRLIYLALAHMIKFRGHFLIEGDLNPDNSDVDKLFIQLVQTYNQLFEENPINASGVDAKAILSARLSKSRRLENLIAQLPGEKKNGLFGNLIALSLGLTPNFKSNFDLAEDAKLQLSKDTYDDDLDNLLAQIGDQYADLFLAAKNLSDAILLSDILRVNTEITKAPLSASMIKRYDEHHQDLTLLKALVRQQLPEKYKEIFFDQSKNGYAGYIDGGASQEEFYKFIKPILEKMDGTEELLVKLNREDLLRKQRTFDNGSIPHQIHLGELHAILRRQEDFYPFLKDNREKIEKILTFRIPYYVGPLARGNSRFAWMTRKSEETITPWNFEEVVDKGASAQSFIERMTNFDKNLPNEKVLPKHSLLYEYFTVYNELTKVKYVTEGMRKPAFLSGEQKKAIVDLLFKTNRKVTVKQLKEDYFKKIECFDSVEISGVEDRFNASLGTYHDLLKIIKDKDFLDNEENEDILEDIVLTLTLFEDREMIEERLKTYAHLFDDKVMKQLKRRRYTGWGRLSRKLINGIRDKQSGKTILDFLKSDGFANRNFMQLIHDDSLTFKEDIQKAQVSGQGDSLHEHIANLAGSPAIKKGILQTVKVVDELVKVMGRHKPENIVIEMARENQTTQKGQKNSRERMKRIEEGIKELGSQILKEHPVENTQLQNEKLYLYYLQNGRDMYVDQELDINRLSDYDVDHIVPQSFLKDDSIDNKVLTRSDKNRGKSDNVPSEEVVKKMKNYWRQLLNAKLITQRKFDNLTKAERGGLSELDKAGFIKRQLVETRQITKHVAQILDSRMNTKYDENDKLIREVKVITLKSKLVSDFRKDFQFYKVREINNYHHAHDAYLNAVVGTALIKKYPKLESEFVYGDYKVYDVRKMIAKSEQEIGKATAKYFFYSNIMNFFKTEITLANGEIRKRPLIETNGETGEIVWDKGRDFATVRKVLSMPQVNIVKKTEVQTGGFSKESILPKRNSDKLIARKKDWDPKKYGGFDSPTVAYSVLVVAKVEKGKSKKLKSVKELLGITIMERSSFEKNPIDFLEAKGYKEVKKDLIIKLPKYSLFELENGRKRMLASAGELQKGNELALPSKYVNFLYLASHYEKLKGSPEDNEQKQLFVEQHKHYLDEIIEQISEFSKRVILADANLDKVLSAYNKHRDKPIREQAENIIHLFTLTNLGAPAAFKYFDTTIDRKRYTSTKEVLDATLIHQSITGLYETRIDLSQLGGDGGGSPKKKRKV

SEQ ID NO: 10 - skipped

SEQ ID NO: 11 - RNA, 4140 nt, synthetic construct
  misc_feature 1..4140: note = Synthetic
  source 1..4140: mol_type = other RNA
atggacaagaagtactccatcggcctggacatcggcaccaactccgtgggctgggccgtgatcaccgacgagtacaaggtgccctccaagaagttcaaggtgctgggcaacaccgaccggcactccatcaagaagaacctgatcggcgccctgctgttcgactccggcgagaccgccgaggccacccggctgaagcggaccgcccggcggcggtacacccggcggaagaaccggatctgctacctgcaggagatcttctccaacgagatggccaaggtggacgactccttcttccaccggctggaggagtccttcctggtggaggaggacaagaagcacgagcggcaccccatcttcggcaacatcgtggacgaggtggcctaccacgagaagtaccccaccatctaccacctgcggaagaagctggtggactccaccgacaaggccgacctgcggctgatctacctggccctggcccacatgatcaagttccggggccacttcctgatcgagggcgacctgaaccccgacaactccgacgtggacaagctgttcatccagctggtgcagacctacaaccagctgttcgaggagaaccccatcaacgcctccggcgtggacgccaaggccatcctgtccgcccggctgtccaagtcccggcggctggagaacctgatcgcccagctgcccggcgagaagaagaacggcctgttcggcaacctgatcgccctgtccctgggcctgacccccaacttcaagtccaacttcgacctggccgaggacgccaagctgcagctgtccaaggacacctacgacgacgacctggacaacctgctggcccagatcggcgaccagtacgccgacctgttcctggccgccaagaacctgtccgacgccatcctgctgtccgacatcctgcgggtgaacaccgagatcaccaaggcccccctgtccgcctccatgatcaagcggtacgacgagcaccaccaggacctgaccctgctgaaggccctggtgcggcagcagctgcccgagaagtacaaggagatcttcttcgaccagtccaagaacggctacgccggctacatcgacggcggcgcctcccaggaggagttctacaagttcatcaagcccatcctggagaagatggacggcaccgaggagctgctggtgaagctgaaccgggaggacctgctgcggaagcagcggaccttcgacaacggctccatcccccaccagatccacctgggcgagctgcacgccatcctgcggcggcaggaggacttctaccccttcctgaaggacaaccgggagaagatcgagaagatcctgaccttccggatcccctactacgtgggccccctggcccggggcaactcccggttcgcctggatgacccggaagtccgaggagaccatcaccccctggaacttcgaggaggtggtggacaagggcgcctccgcccagtccttcatcgagcggatgaccaacttcgacaagaacctgcccaacgagaaggtgctgcccaagcactccctgctgtacgagtacttcaccgtgtacaacgagctgaccaaggtgaagtacgtgaccgagggcatgcggaagcccgccttcctgtccggcgagcagaagaaggccatcgtggacctgctgttcaagaccaaccggaaggtgaccgtgaagcagctgaaggaggactacttcaagaagatcgagtgcttcgactccgtggagatctccggcgtggaggaccggttcaacgcctccctgggcacctaccacgacctgctgaagatcatcaaggacaaggacttcctggacaacgaggagaacgaggacatcctggaggacatcgtgctgaccctgaccctgttcgaggaccgggagatgatcgaggagcggctgaagacctacgcccacctgttcgacgacaaggtgatgaagcagctgaagcggcggcggtacaccggctggggccggctgtcccggaagctgatcaacggcatccgggacaagcagtccggcaagaccatcctggacttcctgaagtccgacggcttcgccaaccggaacttcatgcagctgatccacgacgactccctgaccttcaaggaggacatccagaaggcccaggtgtccggccagggcgactccctgcacgagcacatcgccaacctggccggctcccccgccatcaagaagggcatcctgcagaccgtgaaggtggtggacgagctggtgaaggtgatgggccggcacaagcccgagaacatcgtgatcgagatggcccgggagaaccagaccacccagaagggccagaagaactcccgggagcggatgaagcggatcgaggagggcatcaaggagctgggctcccagatcctgaaggagcaccccgtggagaacacccagctgcagaacgagaagctgtacctgtactacctgcagaacggccgggacatgtacgtggaccaggagctggacatcaaccggctgtccgactacgacgtggaccacatcgtgccccagtccttcctgaaggacgactccatcgacaacaaggtgctgacccggtccgacaagaaccggggcaagtccgacaacgtgccctccgaggaggtggtgaagaagatgaagaactactggcggcagctgctgaacgccaagctgatcacccagcggaagttcgacaacctgaccaaggccgagcggggcggcctgtccgagctggacaaggccggcttcatcaagcggcagctggtggagacccggcagatcaccaagcacgtggcccagatcctggactcccggatgaacaccaagtacgacgagaacgacaagctgatccgggaggtgaaggtgatcaccctgaagtccaagctggtgtccgacttccggaaggacttccagttctacaaggtgcgggagatcaacaactaccaccacgcccacgacgcctacctgaacgccgtggtgggcaccgccctgatcaagaagtaccccaagctggagtccgagttcgtgtacggcgactacaaggtgtacgacgtgcggaagatgatcgccaagtccgagcaggagatcggcaaggccaccgccaagtacttcttctactccaacatcatgaacttcttcaagaccgagatcaccctggccaacggcgagatccggaagcggcccctgatcgagaccaacggcgagaccggcgagatcgtgtgggacaagggccgggacttcgccaccgtgcggaaggtgctgtccatgccccaggtgaacatcgtgaagaagaccgaggtgcagaccggcggcttctccaaggagtccatcctgcccaagcggaactccgacaagctgatcgcccggaagaaggactgggaccccaagaagtacggcggcttcgactcccccaccgtggcctactccgtgctggtggtggccaaggtggagaagggcaagtccaagaagctgaagtccgtgaaggagctgctgggcatcaccatcatggagcggtcctccttcgagaagaaccccatcgacttcctggaggccaagggctacaaggaggtgaagaaggacctgatcatcaagctgcccaagtactccctgttcgagctggagaacggccggaagcggatgctggcctccgccggcgagctgcagaagggcaacgagctggccctgccctccaagtacgtgaacttcctgtacctggcctcccactacgagaagctgaagggctcccccgaggacaacgagcagaagcagctgttcgtggagcagcacaagcactacctggacgagatcatcgagcagatctccgagttctccaagcgggtgatcctggccgacgccaacctggacaaggtgctgtccgcctacaacaagcaccgggacaagcccatccgggagcaggccgagaacatcatccacctgttcaccctgaccaacctgggcgcccccgccgccttcaagtacttcgacaccaccatcgaccggaagcggtacacctccaccaaggaggtgctggacgccaccctgatccaccagtccatcaccggcctgtacgagacccggatcgacctgtcccagctgggcggcgacggcggcggctcccccaagaagaagcggaaggtgtga

SEQ ID NO: 12 - protein, 1379 aa, synthetic construct; identical to SEQ ID NO: 9
  REGION 1..1379: note = Synthetic

SEQ ID NO: 13 - RNA, 5548 nt, synthetic construct
  misc_feature 1..5548: note = Synthetic
  source 1..5548: mol_type = other RNA
gggagacccaagctggctagcgtttaaacttaagctttcccgcagtcggcgtccagcggctctgcttgttcgtgtgtgtgtcgttgcaggccttattcggatccgccaccatgagcagcgaaacaggaccggtcgcagtcgacccgacactgagaagaagaatcgaaccgcacgaattcgaagtcttcttcgacccgagagaactgagaaaggaaacatgcctgctgtacgaaatcaactggggaggaagacacagcatctggagacacacaagccagaacacaaacaagcacgtcgaagtcaacttcatcgaaaagttcacaacagaaagatacttctgcccgaacacaagatgcagcatcacatggttcctgagctggagcccgtgcggagaatgcagcagagcaatcacagaattcctgagcagatacccgcacgtcacactgttcatctacatcgcaagactgtaccaccacgcagacccgagaaacagacagggactgagagacctgatcagcagcggagtcacaatccagatcatgacagaacaggaaagcggatactgctggagaaacttcgtcaactacagcccgagcaacgaagcacactggccgagatacccgcacctgtgggtcagactgtacgtcctggaactgtactgcatcatcctgggactgccgccgtgcctgaacatcctgagaagaaagcagccgcagctgacattcttcacaatcgcactgcagagctgccactaccagagactgccgccgcacatcctgtgggcaacaggactgaagagcggaagcgaaacaccgggaacaagcgaaagcgcaacaccggaaagcgacaagaagtacagcatcggactggccatcggaacaaacagcgtcggatgggcagtcatcacagacgaatacaaggtcccgagcaagaagttcaaggtcctgggaaacacagacagacacagcatcaagaagaacctgatcggagcactgctgttcgacagcggagaaacagcagaagcaacaagactgaagagaacagcaagaagaagatacacaagaagaaagaacagaatctgctacctgcaggaaatcttcagcaacgaaatggcaaaggtcgacgacagcttcttccacagactggaagaaagcttcctggtcgaagaagacaagaagcacgaaagacacccgatcttcggaaacatcgtcgacgaagtcgcataccacgaaaagtacccgacaatctaccacctgagaaagaagctggtcgacagcacagacaaggcagacctgagactgatctacctggcactggcacacatgatcaagttcagaggacacttcctgatcgaaggagacctgaacccggacaacagcgacgtcgacaagctgttcatccagctggtccagacatacaaccagctgttcgaagaaaacccgatcaacgcaagcggagtcgacgcaaaggcaatcctgagcgcaagactgagcaagagcagaagactggaaaacctgatcgcacagctgccgggagaaaagaagaacggactgttcggaaacctgatcgcactgagcctgggactgacaccgaacttcaagagcaacttcgacctggcagaagacgcaaagctgcagctgagcaaggacacatacgacgacgacctggacaacctgctggcacagatcggagaccagtacgcagacctgttcctggcagcaaagaacctgagcgacgcaatcctgctgagcgacatcctgagagtcaacacagaaatcacaaaggcaccgctgagcgcaagcatgatcaagagatacgacgaacaccaccaggacctgacactgctgaaggcactggtcagacagcagctgccggaaaagtacaaggaaatcttcttcgaccagagcaagaacggatacgcaggatacatcgacggaggagcaagccaggaagaattctacaagttcatcaagccgatcctggaaaagatggacggaacagaagaactgctggtcaagctgaacagagaagacctgctgagaaagcagagaacattcgacaacggaagcatcccgcaccagatccacctgggagaactgcacgcaatcctgagaagacaggaagacttctacccgttcctgaaggacaacagagaaaagatcgaaaagatcctgacattcagaatcccgtactacgtcggaccgctggcaagaggaaacagcagattcgcatggatgacaagaaagagcgaagaaacaatcacaccgtggaacttcgaagaagtcgtcgacaagggagcaagcgcacagagcttcatcgaaagaatgacaaacttcgacaagaacctgccgaacgaaaaggtcctgccgaagcacagcctgctgtacgaatacttcacagtctacaacgaactgacaaaggtcaagtacgtcacagaaggaatgagaaagccggcattcctgagcggagaacagaagaaggcaatcgtcgacctgctgttcaagacaaacagaaaggtcacagtcaagcagctgaaggaagactacttcaagaagatcgaatgcttcgacagcgtcgaaatcagcggagtcgaagacagattcaacgcaagcctgggaacataccacgacctgctgaagatcatcaaggacaaggacttcctggacaacgaagaaaacgaagacatcctggaagacatcgtcctgacactgacactgttcgaagacagagaaatgatcgaagaaagactgaagacatacgcacacctgttcgacgacaaggtcatgaagcagctgaagagaagaagatacacaggatggggaagactgagcagaaagctgatcaacggaatcagagacaagcagagcggaaagacaatcctggacttcctgaagagcgacggattcgcaaacagaaacttcatgcagctgatccacgacgacagcctgacattcaaggaagacatccagaaggcacaggtcagcggacagggagacagcctgcacgaacacatcgcaaacctggcaggaagcccggcaatcaagaagggaatcctgcagacagtcaaggtcgtcgacgaactggtcaaggtcatgggaagacacaagccggaaaacatcgtcatcgaaatggcaagagaaaaccagacaacacagaagggacagaagaacagcagagaaagaatgaagagaatcgaagaaggaatcaaggaactgggaagccagatcctgaaggaacacccggtcgaaaacacacagctgcagaacgaaaagctgtacctgtactacctgcagaacggaagagacatgtacgtcgaccaggaactggacatcaacagactgagcgactacgacgtcgaccacatcgtcccgcagagcttcctgaaggacgacagcatcgacaacaaggtcctgacaagaagcgacaagaacagaggaaagagcgacaacgtcccgagcgaagaagtcgtcaagaagatgaagaactactggagacagctgctgaacgcaaagctgatcacacagagaaagttcgacaacctgacaaaggcagagagaggaggactgagcgaactggacaaggcaggattcatcaagagacagctggtcgaaacaagacagatcacaaagcacgtcgcacagatcctggacagcagaatgaacacaaagtacgacgaaaacgacaagctgatcagagaagtcaaggtcatcacactgaagagcaagctggtcagcgacttcagaaaggacttccagttctacaaggtcagagaaatcaacaactaccaccacgcacacgacgcatacctgaacgcagtcgtcggaacagcactgatcaagaagtacccgaagctggaaagcgaattcgtctacggagactacaaggtctacgacgtcagaaagatgatcgcaaagagcgaacaggaaatcggaaaggcaacagcaaagtacttcttctacagcaacatcatgaacttcttcaagacagaaatcacactggcaaacggagaaatcagaaagagaccgctgatcgaaacaaacggagaaacaggagaaatcgtctgggacaagggaagagacttcgcaacagtcagaaaggtcctgagcatgccgcaggtcaacatcgtcaagaagacagaagtccagacaggaggattcagcaaggaaagcatcctgccgaagagaaacagcgacaagctgatcgcaagaaagaaggactgggacccgaagaagtacggaggattcgacagcccgacagtcgcatacagcgtcctggtcgtcgcaaaggtcgaaaagggaaagagcaagaagctgaagagcgtcaaggaactgctgggaatcacaatcatggaaagaagcagcttcgaaaagaacccgatcgacttcctggaagcaaagggatacaaggaagtcaagaaggacctgatcatcaagctgccgaagtacagcctgttcgaactggaaaacggaagaaagagaatgctggcaagcgcaggagaactgcagaagggaaacgaactggcactgccgagcaagtacgtcaacttcctgtacctggcaagccactacgaaaagctgaagggaagcccggaagacaacgaacagaagcagctgttcgtcgaacagcacaagcactacctggacgaaatcatcgaacagatcagcgaattcagcaagagagtcatcctggcagacgcaaacctggacaaggtcctgagcgcatacaacaagcacagagacaagccgatcagagaacaggcagaaaacatcatccacctgttcacactgacaaacctgggagcaccggcagcattcaagtacttcgacacaacaatcgacagaaagagatacacaagcacaaaggaagtcctggacgcaacactgatccaccagagcatcacaggactgtacgaaacaagaatcgatctgagccagctgggaggagacagcggaggaagcacaaacctgagcgacatcatcgaaaaggaaacaggaaagcagctggtcatccaggaaagcatcctgatgctgccggaagaagtcgaagaagtcatcggaaacaagccggaaagcgacatcctggtccacacagcatacgacgaaagcacagacgaaaacgtcatgctgctgacaagcgacgcaccggaatacaagccgtgggcactggtcatccaggacagcaacggagaaaacaagatcaagatgctgagcggaggaagcccgaagaagaagagaaaggtctaatagtctagacatcacatttaaaagcatctcagcctaccatgagaataagagaaagaaaatgaagatcaatagcttattcatctctttttctttttcgttggtgtaaagccaacaccctgtctaaaaaacataaatttctttaatcattttgcctcttttctctgtgcttcaattaataaaaaatggaaagaacctcgagaaaaaaaaaaaaaaaaaaaaaaaaaaaaaagcgaaaaaaaaaaaaaaaaaaaaaaaaaaaaaaccgaaaaaaaaaaaaaaaaaaaaaaaaaaaaaaaaaaaaaaat

SEQ ID NO: 14 - RNA, 5130 nt, synthetic construct
  misc_feature 1..5130: note = Synthetic
  source 1..5130: mol_type = other RNA
atgagcagcgaaacaggaccggtcgcagtcgacccgacactgagaagaagaatcgaaccgcacgaattcgaagtcttcttcgacccgagagaactgagaaaggaaacatgcctgctgtacgaaatcaactggggaggaagacacagcatctggagacacacaagccagaacacaaacaagcacgtcgaagtcaacttcatcgaaaagttcacaacagaaagatacttctgcccgaacacaagatgcagcatcacatggttcctgagctggagcccgtgcggagaatgcagcagagcaatcacagaattcctgagcagatacccgcacgtcacactgttcatctacatcgcaagactgtaccaccacgcagacccgagaaacagacagggactgagagacctgatcagcagcggagtcacaatccagatcatgacagaacaggaaagcggatactgctggagaaacttcgtcaactacagcccgagcaacgaagcacactggccgagatacccgcacctgtgggtcagactgtacgtcctggaactgtactgcatcatcctgggactgccgccgtgcctgaacatcctgagaagaaagcagccgcagctgacattcttcacaatcgcactgcagagctgccactaccagagactgccgccgcacatcctgtgggcaacaggactgaagagcggaagcgaaacaccgggaacaagcgaaagcgcaacaccggaaagcgacaagaagtacagcatcggactggccatcggaacaaacagcgtcggatgggcagtcatcacagacgaatacaaggtcccgagcaagaagttcaaggtcctgggaaacacagacagacacagcatcaagaagaacctgatcggagcactgctgttcgacagcggagaaacagcagaagcaacaagactgaagagaacagcaagaagaagatacacaagaagaaagaacagaatctgctacctgcaggaaatcttcagcaacgaaatggcaaaggtcgacgacagcttcttccacagactggaagaaagcttcctggtcgaagaagacaagaagcacgaaagacacccgatcttcggaaacatcgtcgacgaagtcgcataccacgaaaagtacccgacaatctaccacctgagaaagaagctggtcgacagcacagacaaggcagacctgagactgatctacctggcactggcacacatgatcaagttcagaggacacttcctgatcgaaggagacctgaacccggacaacagcgacgtcgacaagctgttcatccagctggtccagacatacaaccagctgttcgaagaaaacccgatcaacgcaagcggagtcgacgcaaaggcaatcctgagcgcaagactgagcaagagcagaagactggaaaacctgatcgcacagctgccgggagaaaagaagaacggactgttcggaaacctgatcgcactgagcctgggactgacaccgaacttcaagagcaacttcgacctggcagaagacgcaaagctgcagctgagcaaggacacatacgacgacgacctggacaacctgctggcacagatcggagaccagtacgcagacctgttcctggcagcaaagaacctgagcgacgcaatcctgctgagcgacatcctgagagtcaacacagaaatcacaaaggcaccgctgagcgcaagcatgatcaagagatacgacgaacaccaccaggacctgacactgctgaaggcactggtcagacagcagctgccggaaaagtacaaggaaatcttcttcgaccagagcaagaacggatacgcaggatacatcgacggaggagcaagccaggaagaattctacaagttcatcaagccgatcctggaaaagatggacggaacagaagaactgctggtcaagctgaacagagaagacctgctgagaaagcagagaacattcgacaacggaagcatcccgcaccagatccacctgggagaactgcacgcaatcctgagaagacaggaagacttctacccgttcctgaaggacaacagagaaaagatcgaaaagatcctgacattcagaatcccgtactacgtcggaccgctggcaagaggaaacagcagattcgcatggatgacaagaaagagcgaagaaacaatcacaccgtggaacttcgaagaagtcgtcgacaagggagcaagcgcacagagcttcatcgaaagaatgacaaacttcgacaagaacctgccgaacgaaaaggtcctgccgaagcacagcctgctgtacgaatacttcacagtctacaacgaactgacaaaggtcaagtacgtcacagaaggaatgagaaagccggcattcctgagcggagaacagaagaaggcaatcgtcgacctgctgttcaagacaaacagaaaggtcacagtcaagcagctgaaggaagactacttcaagaagatcgaatgcttcgacagcgtcgaaatcagcggagtcgaagacagattcaacgcaagcctgggaacataccacgacctgctgaagatcatcaaggacaaggacttcctggacaacgaagaaaacgaagacatcctggaagacatcgtcctgacactgacactgttcgaagacagagaaatgatcgaagaaagactgaagacatacgcacacctgttcgacgacaaggtcatgaagcagctgaagagaagaagatacacaggatggggaagactgagcagaaagctgatcaacggaatcagagacaagcagagcggaaagacaatcctggacttcctgaagagcgacggattcgcaaacagaaacttcatgcagctgatccacgacgacagcctgacattcaaggaagacatccagaaggcacaggtcagcggacagggagacagcctgcacgaacacatcgcaaacctggcaggaagcccggcaatcaagaagggaatcctgcagacagtcaaggtcgtcgacgaactggtcaaggtcatgggaagacacaagccggaaaacatcgtcatcgaaatggcaagagaaaaccagacaacacagaagggacagaagaacagcagagaaagaatgaagagaatcgaagaaggaatcaaggaactgggaagccagatcctgaaggaacacccggtcgaaaacacacagctgcagaacgaaaagctgtacctgtactacctgcagaacggaagagacatgtacgtcgaccaggaactggacatcaacagactgagcgactacgacgtcgaccacatcgtcccgcagagcttcctgaaggacgacagcatcgacaacaaggtcctgacaagaagcgacaagaacagaggaaagagcgacaacgtcccgagcgaagaagtcgtcaagaagatgaagaactactggagacagctgctgaacgcaaagctgatcacacagagaaagttcgacaacctgacaaaggcagagagaggaggactgagcgaactggacaaggcaggattcatcaagagacagctggtcgaaacaagacagatcacaaagcacgtcgcacagatcctggacagcagaatgaacacaaagtacgacgaaaacgacaagctgatcagagaagtcaaggtcatcacactgaagagcaagctggtcagcgacttcagaaaggacttccagttctacaaggtcagagaaatcaacaactaccaccacgcacacgacgcatacctgaacgcagtcgtcggaacagcactgatcaagaagtacccgaagctggaaagcgaattcgtctacggagactacaaggtctacgacgtcagaaagatgatcgcaaagagcgaacaggaaatcggaaaggcaacagcaaagtacttcttctacagcaacatcatgaacttcttcaagacagaaatcacactggcaaacggagaaatcagaaagagaccgctgatcgaaacaaacggagaaacaggagaaatcgtctgggacaagggaagagacttcgcaacagtcagaaaggtcctgagcatgccgcaggtcaacatcgtcaagaagacagaagtccagacaggaggattcagcaaggaaagcatcctgccgaagagaaacagcgacaagctgatcgcaagaaagaaggactgggacccgaagaagtacggaggattcgacagcccgacagtcgcatacagcgtcctggtcgtcgcaaaggtcgaaaagggaaagagcaagaagctgaagagcgtcaaggaactgctgggaatcacaatcatggaaagaagcagcttcgaaaagaacccgatcgacttcctggaagcaaagggatacaaggaagtcaagaaggacctgatcatcaagctgccgaagtacagcctgttcgaactggaaaacggaagaaagagaatgctggcaagcgcaggagaactgcagaagggaaacgaactggcactgccgagcaagtacgtcaacttcctgtacctggcaagccactacgaaaagctgaagggaagcccggaagacaacgaacagaagcagctgttcgtcgaacagcacaagcactacctggacgaaatcatcgaacagatcagcgaattcagcaagagagtcatcctggcagacgcaaacctggacaaggtcctgagcgcatacaacaagcacagagacaagccgatcagagaacaggcagaaaacatcatccacctgttcacactgacaaacctgggagcaccggcagcattcaagtacttcgacacaacaatcgacagaaagagatacacaagcacaaaggaagtcctggacgcaacactgatccaccagagcatcacaggactgtacgaaacaagaatcgatctgagccagctgggaggagacagcggaggaagcacaaacctgagcgacatcatcgaaaaggaaacaggaaagcagctggtcatccaggaaagcatcctgatgctgccggaagaagtcgaagaagtcatcggaaacaagccggaaagcgacatcctggtccacacagcatacgacgaaagcacagacgaaaacgtcatgctgctgacaagcgacgcaccggaatacaagccgtgggcactggtcatccaggacagcaacggagaaaacaagatcaagatgctgagcggaggaagcccgaagaagaagagaaaggtc

SEQ ID NO: 15 - protein, 1710 aa, synthetic construct
  REGION 1..1710: note = Synthetic
MSSETGPVAVDPTLRRRIEPHEFEVFFDPRELRKETCLLYEINWGGRHSIWRHTSQNTNKHVEVNFIEKFTTERYFCPNTRCSITWFLSWSPCGECSRAITEFLSRYPHVTLFIYIARLYHHADPRNRQGLRDLISSGVTIQIMTEQESGYCWRNFVNYSPSNEAHWPRYPHLWVRLYVLELYCIILGLPPCLNILRRKQPQLTFFTIALQSCHYQRLPPHILWATGLKSGSETPGTSESATPESDKKYSIGLAIGTNSVGWAVITDEYKVPSKKFKVLGNTDRHSIKKNLIGALLFDSGETAEATRLKRTARRRYTRRKNRICYLQEIFSNEMAKVDDSFFHRLEESFLVEEDKKHERHPIFGNIVDEVAYHEKYPTIYHLRKKLVDSTDKADLRLIYLALAHMIKFRGHFLIEGDLNPDNSDVDKLFIQLVQTYNQLFEENPINASGVDAKAILSARLSKSRRLENLIAQLPGEKKNGLFGNLIALSLGLTPNFKSNFDLAEDAKLQLSKDTYDDDLDNLLAQIGDQYADLFLAAKNLSDAILLSDILRVNTEITKAPLSASMIKRYDEHHQDLTLLKALVRQQLPEKYKEIFFDQSKNGYAGYIDGGASQEEFYKFIKPILEKMDGTEELLVKLNREDLLRKQRTFDNGSIPHQIHLGELHAILRRQEDFYPFLKDNREKIEKILTFRIPYYVGPLARGNSRFAWMTRKSEETITPWNFEEVVDKGASAQSFIERMTNFDKNLPNEKVLPKHSLLYEYFTVYNELTKVKYVTEGMRKPAFLSGEQKKAIVDLLFKTNRKVTVKQLKEDYFKKIECFDSVEISGVEDRFNASLGTYHDLLKIIKDKDFLDNEENEDILEDIVLTLTLFEDREMIEERLKTYAHLFDDKVMKQLKRRRYTGWGRLSRKLINGIRDKQSGKTILDFLKSDGFANRNFMQLIHDDSLTFKEDIQKAQVSGQGDSLHEHIANLAGSPAIKKGILQTVKVVDELVKVMGRHKPENIVIEMARENQTTQKGQKNSRERMKRIEEGIKELGSQILKEHPVENTQLQNEKLYLYYLQNGRDMYVDQELDINRLSDYDVDHIVPQSFLKDDSIDNKVLTRSDKNRGKSDNVPSEEVVKKMKNYWRQLLNAKLITQRKFDNLTKAERGGLSELDKAGFIKRQLVETRQITKHVAQILDSRMNTKYDENDKLIREVKVITLKSKLVSDFRKDFQFYKVREINNYHHAHDAYLNAVVGTALIKKYPKLESEFVYGDYKVYDVRKMIAKSEQEIGKATAKYFFYSNIMNFFKTEITLANGEIRKRPLIETNGETGEIVWDKGRDFATVRKVLSMPQVNIVKKTEVQTGGFSKESILPKRNSDKLIARKKDWDPKKYGGFDSPTVAYSVLVVAKVEKGKSKKLKSVKELLGITIMERSSFEKNPIDFLEAKGYKEVKKDLIIKLPKYSLFELENGRKRMLASAGELQKGNELALPSKYVNFLYLASHYEKLKGSPEDNEQKQLFVEQHKHYLDEIIEQISEFSKRVILADANLDKVLSAYNKHRDKPIREQAENIIHLFTLTNLGAPAAFKYFDTTIDRKRYTSTKEVLDATLIHQSITGLYETRIDLSQLGGDSGGSTNLSDIIEKETGKQLVIQESILMLPEEVEEVIGNKPESDILVHTAYDESTDENVMLLTSDAPEYKPWALVIQDSNGENKIKMLSGGSPKKKRKV

SEQ ID NO: 16 - RNA, 5511 nt, synthetic construct
  misc_feature 1..5511: note = Synthetic
  source 1..5511: mol_type = other RNA
gggtcccgcagtcggcgtccagcggctctgcttgttcgtgtgtgtgtcgttgcaggccttattcggatccaccatgagctcagagactggcccagtggctgtggaccccacattgagacggcggatcgagccccatgagtttgaggtattcttcgatccgagagagctccgcaaggagacctgcctgctttacgaaattaattgggggggccggcactccatttggcgacatacatcacagaacactaacaagcacgtcgaagtcaacttcatcgagaagttcacgacagaaagatatttctgtccgaacacaaggtgcagcattacctggtttctcagctggagcccatgcggcgaatgtagtagggccatcactgaattcctgtcaaggtatccccacgtcactctgtttatttacatcgcaaggctgtaccaccacgctgacccccgcaatcgacaaggcctgcgggatttgatctcttcaggtgtgactatccaaattatgactgagcaggagtcaggatactgctggagaaactttgtgaattatagcccgagtaatgaagcccactggcctaggtatccccatctgtgggtacgactgtacgttcttgaactgtactgcatcatactgggcctgcctccttgtctcaacattctgagaaggaagcagccacagctgacattctttaccatcgctcttcagtcttgtcattaccagcgactgcccccacacattctctgggccaccgggttgaaaagcggcagcgagactccgggcacctcagagtccgccacacccgaaagtgataagaagtactcaatcgggctggccatcggaactaattccgtgggttgggcagtgatcacggatgaatacaaagtgccgtccaagaagttcaaggtcctggggaacaccgatagacacagcatcaagaaaaatctcatcggagccctgctgtttgactccggcgaaaccgcagaagcgacccggctcaaacgtaccgcgaggcgacgctacacccggcggaagaatcgcatctgctatctgcaagagatcttttcgaacgaaatggcaaaggtcgacgacagcttcttccaccgcctggaagaatctttcctggtggaggaggacaagaagcatgaacggcatcctatctttggaaacatcgtcgacgaagtggcgtaccacgaaaagtacccgaccatctaccatctgcggaagaagttggttgactcaactgacaaggccgacctcagattgatctacttggccctcgcccatatgatcaaattccgcggacacttcctgatcgaaggcgatctgaaccctgataactccgacgtggataagcttttcattcaactggtgcagacctacaaccaactgttcgaagaaaacccaatcaatgctagcggcgtcgatgccaaggccatcctgtccgcccggctgtcgaagtcgcggcgcctcgaaaacctgatcgcacagctgccgggagagaaaaagaacggacttttcggcaacttgatcgctctctcactgggactcactcccaatttcaagtccaattttgacctggccgaggacgcgaagctgcaactctcaaaggacacctacgacgacgacttggacaatttgctggcacaaattggcgatcagtacgcggatctgttccttgccgctaagaacctttcggacgcaatcttgctgtccgatatcctgcgcgtgaacaccgaaataaccaaagcgccgcttagcgcctcgatgattaagcggtacgacgagcatcaccaggatctcacgctgctcaaagcgctcgtgagacagcaactgcctgaaaagtacaaggagatcttcttcgaccagtccaagaatgggtacgcagggtacatcgatggaggcgctagccaggaagagttctataagttcatcaagccaatcctggaaaagatggacggaaccgaagaactgctggtcaagctgaacagggaggatctgctccggaaacagagaacctttgacaacggatccattccccaccagatccatctgggtgagctgcacgccatcttgcggcgccaggaggacttttacccattcctcaaggacaaccgggaaaagatcgagaaaattctgacgttccgcatcccgtattacgtgggcccactggcgcgcggcaattcgcgcttcgcgtggatgactagaaaatcagaggaaaccatcactccttggaatttcgaggaagttgtggataagggagcttcggcacaaagcttcatcgaacgaatgaccaacttcgacaagaatctcccaaacgagaaggtgcttcctaagcacagcctcctttacgaatacttcactgtctacaacgaactgactaaagtgaaatacgttactgaaggaatgaggaagccggcctttctgtccggagaacagaagaaagcaattgtcgatctgctgttcaagaccaaccgcaaggtgaccgtcaagcagcttaaagaggactacttcaagaagatcgagtgtttcgactcagtggaaatcagcggggtggaggacagattcaacgcttcgctgggaacctatcatgatctcctgaagatcatcaaggacaaggacttccttgacaacgaggagaacgaggacatcctggaagatatcgtcctgaccttgacccttttcgaggatcgcgagatgatcgaggagaggcttaagacctacgctcatctcttcgacgataaggtcatgaaacaactcaagcgccgccggtacactggttggggccgcctctcccgcaagctgatcaacggtattcgcgataaacagagcggtaaaactatcctggatttcctcaaatcggatggcttcgctaatcgtaacttcatgcaattgatccacgacgacagcctgacctttaaggaggacatccaaaaagcacaagtgtccggacagggagactcactccatgaacacatcgcgaatctggccggttcgccggcgattaagaagggaattctgcaaactgtgaaggtggtcgacgagctggtgaaggtcatgggacggcacaaaccggagaatatcgtgattgaaatggcccgagaaaaccagactacccagaagggccagaaaaactcccgcgaaaggatgaagcggatcgaagaaggaatcaaggagctgggcagccagatcctgaaagagcacccggtggaaaacacgcagctgcagaacgagaagctctacctgtactatttgcaaaatggacgggacatgtacgtggaccaagagctggacatcaatcggttgtctgattacgacgtggaccacatcgttccacagtcctttctgaaggatgactcgatcgataacaaggtgttgactcgcagcgacaagaacagagggaagtcagataatgtgccatcggaggaggtcgtgaagaagatgaagaattactggcggcagctcctgaatgcgaagctgattacccagagaaagtttgacaatctcactaaagccgagcgcggcggactctcagagctggataaggctggattcatcaaacggcagctggtcgagactcggcagattaccaagcacgtggcgcagatcttggactcccgcatgaacactaaatacgacgagaacgataagctcatccgggaagtgaaggtgattaccctgaaaagcaaacttgtgtcggactttcggaaggactttcagttttacaaagtgagagaaatcaacaactaccatcacgcgcatgacgcatacctcaacgctgtggtcggtaccgccctgatcaaaaagtaccctaaacttgaatcggagtttgtgtacggagactacaaggtctacgacgtgaggaagatgatagccaagtccgaacaggaaatcgggaaagcaactgcgaaatacttcttttactcaaacatcatgaactttttcaagactgaaattacgctggccaatggagaaatcaggaagaggccactgatcgaaactaacggagaaacgggcgaaatcgtgtgggacaagggcagggacttcgcaactgttcgcaaagtgctctctatgccgcaagtcaatattgtgaagaaaaccgaagtgcaaaccggcggattttcaaaggaatcgatcctcccaaagagaaatagcgacaagctcattgcacgcaagaaagactgggacccgaagaagtacggaggattcgattcgccgactgtcgcatactccgtcctcgtggtggccaaggtggagaagggaaagagcaaaaagctcaaatccgtcaaagagctgctggggattaccatcatggaacgatcctcgttcgagaagaacccgattgatttcctcgaggcgaagggttacaaggaggtgaagaaggatctgatcatcaaactccccaagtactcactgttcgaactggaaaatggtcggaagcgcatgctggcttcggccggagaactccaaaaaggaaatgagctggccttgcctagcaagtacgtcaacttcctctatcttgcttcgcactacgaaaaactcaaagggtcaccggaagataacgaacagaagcagcttttcgtggagcagcacaagcattatctggatgaaatcatcgaacaaatctccgagttttcaaagcgcgtgatcctcgccgacgccaacctcgacaaagtcctgtcggcctacaataagcatagagataagccgatcagagaacaggccgagaacattatccacttgttcaccctgactaacctgggagccccagccgccttcaagtacttcgatactactatcgatcgcaaaagatacacgtccaccaaggaagttctggacgcgaccctgatccaccaaagcatcactggactctacgaaactaggatcgatctgtcgcagctgggtggcgattctggtggttctactaatctgtcagatattattgaaaaggagaccggtaagcaactggttatccaggaatccatcctcatgctcccagaggaggtggaagaagtcattgggaacaagccggaaagcgatatactcgtgcacaccgcctacgacgagagcaccgacgagaatgtcatgcttctgactagcgacgcccctgaatacaagccttgggctctggtcatacaggatagcaacggtgagaacaagattaagatgctctctggtggttctcccaagaagaagaggaaagtctaatagtctagccatcacatttaaaagcatctcagcctaccatgagaataagagaaagaaaatgaagatcaatagcttattcatctctttttctttttcgttggtgtaaagccaacaccctgtctaaaaaacataaatttctttaatcattttgcctcttttctctgtgcttcaattaataaaaaatggaaagaacctcgagaaaaaaaaaaaaaaaaaaaaaaaaaaaaaagcgaaaaaaaaaaaaaaaaaaaaaaaaaaaaaaccgaaaaaaaaaaaaaaaaaaaaaaaaaaaaaaaaaaaaaaat

SEQ ID NO: 17 - RNA, 5133 nt, synthetic construct
  misc_feature 1..5133: note = Synthetic
  source 1..5133: mol_type = other RNA
atgagctcagagactggcccagtggctgtggaccccacattgagacggcggatcgagccccatgagtttgaggtattcttcgatccgagagagctccgcaaggagacctgcctgctttacgaaattaattgggggggccggcactccatttggcgacatacatcacagaacactaacaagcacgtcgaagtcaacttcatcgagaagttcacgacagaaagatatttctgtccgaacacaaggtgcagcattacctggtttctcagctggagcccatgcggcgaatgtagtagggccatcactgaattcctgtcaaggtatccccacgtcactctgtttatttacatcgcaaggctgtaccaccacgctgacccccgcaatcgacaaggcctgcgggatttgatctcttcaggtgtgactatccaaattatgactgagcaggagtcaggatactgctggagaaactttgtgaattatagcccgagtaatgaagcccactggcctaggtatccccatctgtgggtacgactgtacgttcttgaactgtactgcatcatactgggcctgcctccttgtctcaacattctgagaaggaagcagccacagctgacattctttaccatcgctcttcagtcttgtcattaccagcgactgcccccacacattctctgggccaccgggttgaaaagcggcagcgagactccgggcacctcagagtccgccacacccgaaagtgataagaagtactcaatcgggctggccatcggaactaattccgtgggttgggcagtgatcacggatgaatacaaagtgccgtccaagaagttcaaggtcctggggaacaccgatagacacagcatcaagaaaaatctcatcggagccctgctgtttgactccggcgaaaccgcagaagcgacccggctcaaacgtaccgcgaggcgacgctacacccggcggaagaatcgcatctgctatctgcaagagatcttttcgaacgaaatggcaaaggtcgacgacagcttcttccaccgcctggaagaatctttcctggtggaggaggacaagaagcatgaacggcatcctatctttggaaacatcgtcgacgaagtggcgtaccacgaaaagtacccgaccatctaccatctgcggaagaagttggttgactcaactgacaaggccgacctcagattgatctacttggccctcgcccatatgatcaaattccgcggacacttcctgatcgaaggcgatctgaaccctgataactccgacgtggataagcttttcattcaactggtgcagacctacaaccaactgttcgaagaaaacccaatcaatgctagcggcgtcgatgccaaggccatcctgtccgcccggctgtcgaagtcgcggcgcctcgaaaacctgatcgcacagctgccgggagagaaaaagaacggacttttcggcaacttgatcgctctctcactgggactcactcccaatttcaagtccaattttgacctggccgaggacgcgaagctgcaactctcaaaggacacctacgacgacgacttggacaatttgctggcacaaattggcgatcagtacgcggatctgttccttgccgctaagaacctttcggacgcaatcttgctgtccgatatcctgcgcgtgaacaccgaaataaccaaagcgccgcttagcgcctcgatgattaagcggtacgacgagcatcaccaggatctcacgctgctcaaagcgctcgtgagacagcaactgcctgaaaagtacaaggagatcttcttcgaccagtccaagaatgggtacgcagggtacatcgatggaggcgctagccaggaagagttctataagttcatcaagccaatcctggaaaagatggacggaaccgaagaactgctggtcaagctgaacagggaggatctgctccggaaacagagaacctttgacaacggatccattccccaccagatccatctgggtgagctgcacgccatcttgcggcgccaggaggacttttacccattcctcaaggacaaccgggaaaagatcgagaaaattctgacgttccgcatcccgtattacgtgggcccactggcgcgcggcaattcgcgcttcgcgtggatgactagaaaatcagaggaaaccatcactccttggaatttcgaggaagttgtggataagggagcttcggcacaaagcttcatcgaacgaatgaccaacttcgacaagaatctcccaaacgagaaggtgcttcctaagcacagcctcctttacgaatacttcactgtctacaacgaactgactaaagtgaaatacgttactgaaggaatgaggaagccggcctttctgtccggagaacagaagaaagcaattgtcgatctgctgttcaagaccaaccgcaaggtgaccgtcaagcagcttaaagaggactacttcaagaagatcgagtgtttcgactcagtggaaatcagcggggtggaggacagattcaacgcttcgctgggaacctatcatgatctcctgaagatcatcaaggacaaggacttccttgacaacgaggagaacgaggacatcctggaagatatcgtcctgaccttgacccttttcgaggatcgcgagatgatcgaggagaggcttaagacctacgctcatctcttcgacgataaggtcatgaaacaactcaagcgccgccggtacactggttggggccgcctctcccgcaagctgatcaacggtattcgcgataaacagagcggtaaaactatcctggatttcctcaaatcggatggcttcgctaatcgtaacttcatgcaattgatccacgacgacagcctgacctttaaggaggacatccaaaaagcacaagtgtccggacagggagactcactccatgaacacatcgcgaatctggccggttcgccggcgattaagaagggaattctgcaaactgtgaaggtggtcgacgagctggtgaaggtcatgggacggcacaaaccggagaatatcgtgattgaaatggcccgagaaaaccagactacccagaagggccagaaaaactcccgcgaaaggatgaagcggatcgaagaaggaatcaaggagctgggcagccagatcctgaaagagcacccggtggaaaacacgcagctgcagaacgagaagctctacctgtactatttgcaaaatggacgggacatgtacgtggaccaagagctggacatcaatcggttgtctgattacgacgtggaccacatcgttccacagtcctttctgaaggatgactcgatcgataacaaggtgttgactcgcagcgacaagaacagagggaagtcagataatgtgccatcggaggaggtcgtgaagaagatgaagaattactggcggcagctcctgaatgcgaagctgattacccagagaaagtttgacaatctcactaaagccgagcgcggcggactctcagagctggataaggctggattcatcaaacggcagctggtcgagactcggcagattaccaagcacgtggcgcagatcttggactcccgcatgaacactaaatacgacgagaacgataagctcatccgggaagtgaaggtgattaccctgaaaagcaaacttgtgtcggactttcggaaggactttcagttttacaaagtgagagaaatcaacaactaccatcacgcgcatgacgcatacctcaacgctgtggtcggtaccgccctgatcaaaaagtaccctaaacttgaatcggagtttgtgtacggagactacaaggtctacgacgtgaggaagatgatagccaagtccgaacaggaaatcgggaaagcaactgcgaaatacttcttttactcaaacatcatgaactttttcaagactgaaattacgctggccaatggagaaatcaggaagaggccactgatcgaaactaacggagaaacgggcgaaatcgtgtgggacaagggcagggacttcgcaactgttcgcaaagtgctctctatgccgcaagtcaatattgtgaagaaaaccgaagtgcaaaccggcggattttcaaaggaatcgatcctcccaaagagaaatagcgacaagctcattgcacgcaagaaagactgggacccgaagaagtacggaggattcgattcgccgactgtcgcatactccgtcctcgtggtggccaaggtggagaagggaaagagcaaaaagctcaaatccgtcaaagagctgctggggattaccatcatggaacgatcctcgttcgagaagaacccgattgatttcctcgaggcgaagggttacaaggaggtgaagaaggatctgatcatcaaactccccaagtactcactgttcgaactggaaaatggtcggaagcgcatgctggcttcggccggagaactccaaaaaggaaatgagctggccttgcctagcaagtacgtcaacttcctctatcttgcttcgcactacgaaaaactcaaagggtcaccggaagataacgaacagaagcagcttttcgtggagcagcacaagcattatctggatgaaatcatcgaacaaatctccgagttttcaaagcgcgtgatcctcgccgacgccaacctcgacaaagtcctgtcggcctacaataagcatagagataagccgatcagagaacaggccgagaacattatccacttgttcaccctgactaacctgggagccccagccgccttcaagtacttcgatactactatcgatcgcaaaagatacacgtccaccaaggaagttctggacgcgaccctgatccaccaaagcatcactggactctacgaaactaggatcgatctgtcgcagctgggtggcgattctggtggttctactaatctgtcagatattattgaaaaggagaccggtaagcaactggttatccaggaatccatcctcatgctcccagaggaggtggaagaagtcattgggaacaagccggaaagcgatatactcgtgcacaccgcctacgacgagagcaccgacgagaatgtcatgcttctgactagcgacgcccctgaatacaagccttgggctctggtcatacaggatagcaacggtgagaacaagattaagatgctctctggtggttctcccaagaagaagaggaaagtctaa

SEQ ID NO: 18 - protein, 1710 aa, synthetic construct; identical to SEQ ID NO: 15
  REGION 1..1710: note = Synthetic

SEQ ID NO: 19 - RNA, 5458 nt, synthetic construct
  misc_feature 1..5458: note = Synthetic
  source 1..5458: mol_type = other RNA
gggagacccaagctggctagcgtttaaacttaagctttcccgcagtcggcgtccagcggctctgcttgttcgtgtgtgtgtcgttgcaggccttattcggatccgccaccatggaagcaagcccggcaagcggaccgagacacctgatggacccgcacatcttcacaagcaacttcaacaacggaatcggaagacacaagacatacctgtgctacgaagtcgaaagactggacaacggaacaagcgtcaagatggaccagcacagaggattcctgcacaaccaggcaaagaacctgctgtgcggattctacggaagacacgcagaactgagattcctggacctggtcccgagcctgcagctggacccggcacagatctacagagtcacatggttcatcagctggagcccgtgcttcagctggggatgcgcaggagaagtcagagcatttctgcaggaaaacacacacgtcagactgagaatcttcgcagcaagaatctacgactacgacccgctgtacaaggaagcactgcagatgctgagagacgcaggagcacaggtcagcatcatgacatacgacgaattcaagcactgctgggacacattcgtcgaccaccagggatgcccgttccagccgtgggacggactggacgaacacagccaggcactgagcggaagactgagagcaatcctgcagaaccagggaaacagcggaagcgaaacaccgggaacaagcgaaagcgcaacaccggaaagcgacaagaagtacagcatcggactggccatcggaacaaacagcgtcggatgggcagtcatcacagacgaatacaaggtcccgagcaagaagttcaaggtcctgggaaacacagacagacacagcatcaagaagaacctgatcggagcactgctgttcgacagcggagaaacagcagaagcaacaagactgaagagaacagcaagaagaagatacacaagaagaaagaacagaatctgctacctgcaggaaatcttcagcaacgaaatggcaaaggtcgacgacagcttcttccacagactggaagaaagcttcctggtcgaagaagacaagaagcacgaaagacacccgatcttcggaaacatcgtcgacgaagtcgcataccacgaaaagtacccgacaatctaccacctgagaaagaagctggtcgacagcacagacaaggcagacctgagactgatctacctggcactggcacacatgatcaagttcagaggacacttcctgatcgaaggagacctgaacccggacaacagcgacgtcgacaagctgttcatccagctggtccagacatacaaccagctgttcgaagaaaacccgatcaacgcaagcggagtcgacgcaaaggcaatcctgagcgcaagactgagcaagagcagaagactggaaaacctgatcgcacagctgccgggagaaaagaagaacggactgttcggaaacctgatcgcactgagcctgggactgacaccgaacttcaagagcaacttcgacctggcagaagacgcaaagctgcagctgagcaaggacacatacgacgacgacctggacaacctgctggcacagatcggagaccagtacgcagacctgttcctggcagcaaagaacctgagcgacgcaatcctgctgagcgacatcctgagagtcaacacagaaatcacaaaggcaccgctgagcgcaagcatgatcaagagatacgacgaacaccaccaggacctgacactgctgaaggcactggtcagacagcagctgccggaaaagtacaaggaaatcttcttcgaccagagcaagaacggatacgcaggatacatcgacggaggagcaagccaggaagaattctacaagttcatcaagccgatcctggaaaagatggacggaacagaagaactgctggtcaagctgaacagagaagacctgctgagaaagcagagaacattcgacaacggaagcatcccgcaccagatccacctgggagaactgcacgcaatcctgagaagacaggaagacttctacccgttcctgaaggacaacagagaaaagatcgaaaagatcctgacattcagaatcccgtactacgtcggaccgctggcaagaggaaacagcagattcgcatggatgacaagaaagagcgaagaaacaatcacaccgtggaacttcgaagaagtcgtcgacaagggagcaagcgcacagagcttcatcgaaagaatgacaaacttcgacaagaacctgccgaacgaaaaggtcctgccgaagcacagcctgctgtacgaatacttcacagtctacaacgaactgacaaaggtcaagtacgtcacagaaggaatgagaaagccggcattcctgagcggagaacagaagaaggcaatcgtcgacctgctgttcaagacaaacagaaaggtcacagtcaagcagctgaaggaagactacttcaagaagatcgaatgcttcgacagcgtcgaaatcagcggagtcgaagacagattcaacgcaagcctgggaacataccacgacctgctgaagatcatcaaggacaaggacttcctggacaacgaagaaaacgaagacatcctggaagacatcgtcctgacactgacactgttcgaagacagagaaatgatcgaagaaagactgaagacatacgcacacctgttcgacgacaaggtcatgaagcagctgaagagaagaagatacacaggatggggaagactgagcagaaagctgatcaacggaatcagagacaagcagagcggaaagacaatcctggacttcctgaagagcgacggattcgcaaacagaaacttcatgcagctgatccacgacgacagcctgacattcaaggaagacatccagaaggcacaggtcagcggacagggagacagcctgcacgaacacatcgcaaacctggcaggaagcccggcaatcaagaagggaatcctgcagacagtcaaggtcgtcgacgaactggtcaaggtcatgggaagacacaagccggaaaacatcgtcatcgaaatggcaagagaaaaccagacaacacagaagggacagaagaacagcagagaaagaatgaagagaatcgaagaaggaatcaaggaactgggaagccagatcctgaaggaacacccggtcgaaaacacacagctgcagaacgaaaagctgtacctgtactacctgcagaacggaagagacatgtacgtcgaccaggaactggacatcaacagactgagcgactacgacgtcgaccacatcgtcccgcagagcttcctgaaggacgacagcatcgacaacaaggtcctgacaagaagcgacaagaacagaggaaagagcgacaacgtcccgagcgaagaagtcgtcaagaagatgaagaactactggagacagctgctgaacgcaaagctgatcacacagagaaagttcgacaacctgacaaaggcagagagaggaggactgagcgaactggacaaggcaggattcatcaagagacagctggtcgaaacaagacagatcacaaagcacgtcgcacagatcctggacagcagaatgaacacaaagtacgacgaaaacgacaagctgatcagagaagtcaaggtcatcacactgaagagcaagctggtcagcgacttcagaaaggacttccagttctacaaggtcagagaaatcaacaactaccaccacgcacacgacgcatacctgaacgcagtcgtcggaacagcactgatcaagaagtacccgaagctggaaagcgaattcgtctacggagactacaaggtctacgacgtcagaaagatgatcgcaaagagcgaacaggaaatcggaaaggcaacagcaaagtacttcttctacagcaacatcatgaacttcttcaagacagaaatcacactggcaaacggagaaatcagaaagagaccgctgatcgaaacaaacggagaaacaggagaaatcgtctgggacaagggaagagacttcgcaacagtcagaaaggtcctgagcatgccgcaggtcaacatcgtcaagaagacagaagtccagacaggaggattcagcaaggaaagcatcctgccgaagagaaacagcgacaagctgatcgcaagaaagaaggactgggacccgaagaagtacggaggattcgacagcccgacagtcgcatacagcgtcctggtcgtcgcaaaggtcgaaaagggaaagagcaagaagctgaagagcgtcaaggaactgctgggaatcacaatcatggaaagaagcagcttcgaaaagaacccgatcgacttcctggaagcaaagggatacaaggaagtcaagaaggacctgatcatcaagctgccgaagtacagcctgttcgaactggaaaacggaagaaagagaatgctggcaagcgcaggagaactgcagaagggaaacgaactggcactgccgagcaagtacgtcaacttcctgtacctggcaagccactacgaaaagctgaagggaagcccggaagacaacgaacagaagcagctgttcgtcgaacagcacaagcactacctggacgaaatcatcgaacagatcagcgaattcagcaagagagtcatcctggcagacgcaaacctggacaaggtcctgagcgcatacaacaagcacagagacaagccgatcagagaacaggcagaaaacatcatccacctgttcacactgacaaacctgggagcaccggcagcattcaagtacttcgacacaacaatcgacagaaagagatacacaagcacaaaggaagtcctggacgcaacactgatccaccagagcatcacaggactgtacgaaacaagaatcgatctgagccagctgggaggagacagcggaggaagcacaaacctgagcgacatcatcgaaaaggaaacaggaaagcagctggtcatccaggaaagcatcctgatgctgccggaagaagtcgaagaagtcatcggaaacaagccggaaagcgacatcctggtccacacagcatacgacgaaagcacagacgaaaacgtcatgctgctgacaagcgacgcaccggaatacaagccgtgggcactggtcatccaggacagcaacggagaaaacaagatcaagatgctgagcggaggaagcccgaagaagaagagaaaggtctaatagtctagacatcacatttaaaagcatctcagcctaccatgagaataagagaaagaaaatgaagatcaatagcttattcatctctttttctttttcgttggtgtaaagccaacaccctgtctaaaaaacataaatttctttaatcattttgcctcttttctctgtgcttcaattaataaaaaatggaaagaacctcgagaaaaaaaaaaaaaaaaaaaaaaaaaaaaaagcgaaaaaaaaaaaaaaaaaaaaaaaaaaaaaaccgaaaaaaaaaaaaaaaaaaaaaaaaaaaaaaaaaaaaaaat

SEQ ID NO: 20 - RNA, 5043 nt, synthetic construct
  misc_feature 1..5043: note = Synthetic
  source 1..5043: mol_type = other RNA
atggaagcaagcccggcaagcggaccgagacacctgatggacccgcacatcttcacaagcaacttcaacaacggaatcggaagacacaagacatacctgtgctacgaagtcgaaagactggacaacggaacaagcgtcaagatggaccagcacagaggattcctgcacaaccaggcaaagaacctgctgtgcggattctacggaagacacgcagaactgagattcctggacctggtcccgagcctgcagctggacccggcacagatctacagagtcacatggttcatcagctggagcccgtgcttcagctggggatgcgcaggagaagtcagagcatttctgcaggaaaacacacacgtcagactgagaatcttcgcagcaagaatctacgactacgacccgctgtacaaggaagcactgcagatgctgagagacgcaggagcacaggtcagcatcatgacatacgacgaattcaagcactgctgggacacattcgtcgaccaccagggatgcccgttccagccgtgggacggactggacgaacacagccaggcactgagcggaagactgagagcaatcctgcagaaccagggaaacagcggaagcgaaacaccgggaacaagcgaaagcgcaacaccggaaagcgacaagaagtacagcatcggactggccatcggaacaaacagcgtcggatgggcagtcatcacagacgaatacaaggtcccgagcaagaagttcaaggtcctgggaaacacagacagacacagcatcaagaagaacctgatcggagcactgctgttcgacagcggagaaacagcagaagcaacaagactgaagagaacagcaagaagaagatacacaagaagaaagaacagaatctgctacctgcaggaaatcttcagcaacgaaatggcaaaggtcgacgacagcttcttccacagactggaagaaagcttcctggtcgaagaagacaagaagcacgaaagacacccgatcttcggaaacatcgtcgacgaagtcgcataccacgaaaagtacccgacaatctaccacctgagaaagaagctggtcgacagcacagacaaggcagacctgagactgatctacctggcactggcacacatgatcaagttcagaggacacttcctgatcgaaggagacctgaacccggacaacagcgacgtcgacaagctgttcatccagctggtccagacatacaaccagctgttcgaagaaaacccgatcaacgcaagcggagtcgacgcaaaggcaatcctgagcgcaagactgagcaagagcagaagactggaaaacctgatcgcacagctgccgggagaaaagaagaacggactgttcggaaacctgatcgcactgagcctgggactgacaccgaacttcaagagcaacttcgacctggcagaagacgcaaagctgcagctgagcaaggacacatacgacgacgacctggacaacctgctggcacagatcggagaccagtacgcagacctgttcctggcagcaaagaacctgagcgacgcaatcctgctgagcgacatcctgagagtcaacacagaaatcacaaaggcaccgctgagcgcaagcatgatcaagagatacgacgaacaccaccaggacctgacactgctgaaggcactggtcagacagcagctgccggaaaagtacaaggaaatcttcttcgaccagagcaagaacggatacgcaggatacatcgacggaggagcaagccaggaagaattctacaagttcatcaagccgatcctggaaaagatggacggaacagaagaactgctggtcaagctgaacagagaagacctgctgagaaagcagagaacattcgacaacggaagcatcccgcaccagatccacctgggagaactgcacgcaatcctgagaagacaggaagacttctacccgttcctgaaggacaacagagaaaagatcgaaaagatcctgacattcagaatcccgtactacgtcggaccgctggcaagaggaaacagcagattcgcatggatgacaagaaagagcgaagaaacaatcacaccgtggaacttcgaagaagtcgtcgacaagggagcaagcgcacagagcttcatcgaaagaatgacaaacttcgacaagaacctgccgaacgaaaaggtcctgccgaagcacagcctgctgtacgaatacttcacagtctacaacgaactgacaaaggtcaagtacgtcacagaaggaatgagaaagccggcattcctgagcggagaacagaagaaggcaatcgtcgacctgctgttcaagacaaacagaaaggtcacagtcaagcagctgaaggaagactacttcaagaagatcgaatgcttcgacagcgtcgaaatcagcggagtcgaagacagattcaacgcaagcctgggaacataccacgacctgctgaagatcatcaaggacaaggacttcctggacaacgaagaaaacgaagacatcctggaagacatcgtcctgacactgacactgttcgaagacagagaaatgatcgaagaaagactgaagacatacgcacacctgttcgacgacaaggtcatgaagcagctgaagagaagaagatacacaggatggggaagactgagcagaaagctgatcaacggaatcagagacaagcagagcggaaagacaatcctggacttcctgaagagcgacggattcgcaaacagaaacttcatgcagctgatccacgacgacagcctgacattcaaggaagacatccagaaggcacaggtcagcggacagggagacagcctgcacgaacacatcgcaaacctggcaggaagcccggcaatcaagaagggaatcctgcagacagtcaaggtcgtcgacgaactggtcaaggtcatgggaagacacaagccggaaaacatcgtcatcgaaatggcaagagaaaaccagacaacacagaagggacagaagaacagcagagaaagaatgaagagaatcgaagaaggaatcaaggaactgggaagccagatcctgaaggaacacccggtcgaaaacacacagctgcagaacgaaaagctgtacctgtactacctgcagaacggaagagacatgtacgtcgaccaggaactggacatcaacagactgagcgactacgacgtcgaccacatcgtcccgcagagcttcctgaaggacgacagcatcgacaacaaggtcctgacaagaagcgacaagaacagaggaaagagcgacaacgtcccgagcgaagaagtcgtcaagaagatgaagaactactggagacagctgctgaacgcaaagctgatcacacagagaaagttcgacaacctgacaaaggcagagagaggaggactgagcgaactggacaaggcaggattcatcaagagacagctggtcgaaacaagacagatcacaaagcacgtcgcacagatcctggacagcagaatgaacacaaagtacgacgaaaacgacaagctgatcagagaagtcaaggtcatcacactgaagagcaagctggtcagcgacttcagaaaggacttccagttctacaaggtcagagaaatcaacaactaccaccacgcacacgacgcatacctgaacgcagtcgtcggaacagcactgatcaagaagtacccgaagctggaaagcgaattcgtctacggagactacaaggtctacgacgtcagaaagatgatcgcaaagagcgaacaggaaatcggaaaggcaacagcaaagtacttcttctacagcaacatcatgaacttcttcaagacagaaatcacactggcaaacggagaaatcagaaagagaccgctgatcgaaacaaacggagaaacaggagaaatcgtctgggacaagggaagagacttcgcaacagtcagaaaggtcctgagcatgccgcaggtcaacatcgtcaagaagacagaagtccagacaggaggattcagcaaggaaagcatcctgccgaagagaaacagcgacaagctgatcgcaagaaagaaggactgggacccgaagaagtacggaggattcgacagcccgacagtcgcatacagcgtcctggtcgtcgcaaaggtcgaaaagggaaagagcaagaagctgaagagcgtcaaggaactgctgggaatcacaatcatggaaagaagcagcttcgaaaagaacccgatcgacttcctggaagcaaagggatacaaggaagtcaagaaggacctgatcatcaagctgccgaagtacagcctgttcgaactggaaaacggaagaaagagaatgctggcaagcgcaggagaactgcagaagggaaacgaactggcactgccgagcaagtacgtcaacttcctgtacctggcaagccactacgaaaagctgaagggaagcccggaagacaacgaacagaagcagctgttcgtcgaacagcacaagcactacctggacgaaatcatcgaacagatcagcgaattcagcaagagagtcatcctggcagacgcaaacctggacaaggtcctgagcgcatacaacaagcacagagacaagccgatcagagaacaggcagaaaacatcatccacctgttcacactgacaaacctgggagcaccggcagcattcaagtacttcgacacaacaatcgacagaaagagatacacaagcacaaaggaagtcctggacgcaacactgatccaccagagcatcacaggactgtacgaaacaagaatcgatctgagccagctgggaggagacagcggaggaagcacaaacctgagcgacatcatcgaaaaggaaacaggaaagcagctggtcatccaggaaagcatcctgatgctgccggaagaagtcgaagaagtcatcggaaacaagccggaaagcgacatcctggtccacacagcatacgacgaaagcacagacgaaaacgtcatgctgctgacaagcgacgcaccggaatacaagccgtgggcactggtcatccaggacagcaacggagaaaacaagatcaagatgctgagcggaggaagcccgaagaagaagagaaaggtctaa

SEQ ID NO: 21 - protein, 1680 aa, synthetic construct
  REGION 1..1680: note = Synthetic
MEASPASGPRHLMDPHIFTSNFNNGIGRHKTYLCYEVERLDNGTSVKMDQHRGFLHNQAKNLLCGFYGRHAELRFLDLVPSLQLDPAQIYRVTWFISWSPCFSWGCAGEVRAFLQENTHVRLRIFAARIYDYDPLYKEALQMLRDAGAQVSIMTYDEFKHCWDTFVDHQGCPFQPWDGLDEHSQALSGRLRAILQNQGNSGSETPGTSESATPESDKKYSIGLAIGTNSVGWAVITDEYKVPSKKFKVLGNTDRHSIKKNLIGALLFDSGETAEATRLKRTARRRYTRRKNRICYLQEIFSNEMAKVDDSFFHRLEESFLVEEDKKHERHPIFGNIVDEVAYHEKYPTIYHLRKKLVDSTDKADLRLIYLALAHMIKFRGHFLIEGDLNPDNSDVDKLFIQLVQTYNQLFEENPINASGVDAKAILSARLSKSRRLENLIAQLPGEKKNGLFGNLIALSLGLTPNFKSNFDLAEDAKLQLSKDTYDDDLDNLLAQIGDQYADLFLAAKNLSDAILLSDILRVNTEITKAPLSASMIKRYDEHHQDLTLLKALVRQQLPEKYKEIFFDQSKNGYAGYIDGGASQEEFYKFIKPILEKMDGTEELLVKLNREDLLRKQRTFDNGSIPHQIHLGELHAILRRQEDFYPFLKDNREKIEKILTFRIPYYVGPLARGNSRFAWMTRKSEETITPWNFEEVVDKGASAQSFIERMTNFDKNLPNEKVLPKHSLLYEYFTVYNELTKVKYVTEGMRKPAFLSGEQKKAIVDLLFKTNRKVTVKQLKEDYFKKIECFDSVEISGVEDRFNASLGTYHDLLKIIKDKDFLDNEENEDILEDIVLTLTLFEDREMIEERLKTYAHLFDDKVMKQLKRRRYTGWGRLSRKLINGIRDKQSGKTILDFLKSDGFANRNFMQLIHDDSLTFKEDIQKAQVSGQGDSLHEHIANLAGSPAIKKGILQTVKVVDELVKVMGRHKPENIVIEMARENQTTQKGQKNSRERMKRIEEGIKELGSQILKEHPVENTQLQNEKLYLYYLQNGRDMYVDQELDINRLSDYDVDHIVPQSFLKDDSIDNKVLTRSDKNRGKSDNVPSEEVVKKMKNYWRQLLNAKLITQRKFDNLTKAERGGLSELDKAGFIKRQLVETRQITKHVAQILDSRMNTKYDENDKLIREVKVITLKSKLVSDFRKDFQFYKVREINNYHHAHDAYLNAVVGTALIKKYPKLESEFVYGDYKVYDVRKMIAKSEQEIGKATAKYFFYSNIMNFFKTEITLANGEIRKRPLIETNGETGEIVWDKGRDFATVRKVLSMPQVNIVKKTEVQTGGFSKESILPKRNSDKLIARKKDWDPKKYGGFDSPTVAYSVLVVAKVEKGKSKKLKSVKELLGITIMERSSFEKNPIDFLEAKGYKEVKKDLIIKLPKYSLFELENGRKRMLASAGELQKGNELALPSKYVNFLYLASHYEKLKGSPEDNEQKQLFVEQHKHYLDEIIEQISEFSKRVILADANLDKVLSAYNKHRDKPIREQAENIIHLFTLTNLGAPAAFKYFDTTIDRKRYTSTKEVLDATLIHQSITGLYETRIDLSQLGGDSGGSTNLSDIIEKETGKQLVIQESILMLPEEVEEVIGNKPESDILVHTAYDESTDENVMLLTSDAPEYKPWALVIQDSNGENKIKMLSGGSPKKKRKV

SEQ ID NO: 22 - skipped

SEQ ID NO: 23 - RNA, 4197 nt, synthetic construct
  misc_feature 1..4197: note = Synthetic
  source 1..4197: mol_type = other RNA
atggacaagaagtactccatcggcctggacatcggcaccaactccgtgggctgggccgtgatcaccgacgagtacaaggtgccctccaagaagttcaaggtgctgggcaacaccgaccggcactccatcaagaagaacctgatcggcgccctgctgttcgactccggcgagaccgccgaggccacccggctgaagcggaccgcccggcggcggtacacccggcggaagaaccggatctgctacctgcaggagatcttctccaacgagatggccaaggtggacgactccttcttccaccggctggaggagtccttcctggtggaggaggacaagaagcacgagcggcaccccatcttcggcaacatcgtggacgaggtggcctaccacgagaagtaccccaccatctaccacctgcggaagaagctggtggactccaccgacaaggccgacctgcggctgatctacctggccctggcccacatgatcaagttccggggccacttcctgatcgagggcgacctgaaccccgacaactccgacgtggacaagctgttcatccagctggtgcagacctacaaccagctgttcgaggagaaccccatcaacgcctccggcgtggacgccaaggccatcctgtccgcccggctgtccaagtcccggcggctggagaacctgatcgcccagctgcccggcgagaagaagaacggcctgttcggcaacctgatcgccctgtccctgggcctgacccccaacttcaagtccaacttcgacctggccgaggacgccaagctgcagctgtccaaggacacctacgacgacgacctggacaacctgctggcccagatcggcgaccagtacgccgacctgttcctggccgccaagaacctgtccgacgccatcctgctgtccgacatcctgcgggtgaacaccgagatcaccaaggcccccctgtccgcctccatgatcaagcggtacgacgagcaccaccaggacctgaccctgctgaaggccctggtgcggcagcagctgcccgagaagtacaaggagatcttcttcgaccagtccaagaacggctacgccggctacatcgacggcggcgcctcccaggaggagttctacaagttcatcaagcccatcctggagaagatggacggcaccgaggagctgctggtgaagctgaaccgggaggacctgctgcggaagcagcggaccttcgacaacggctccatcccccaccagatccacctgggcgagctgcacgccatcctgcggcggcaggaggacttctaccccttcctgaaggacaaccgggagaagatcgagaagatcctgaccttccggatcccctactacgtgggccccctggcccggggcaactcccggttcgcctggatgacccggaagtccgaggagaccatcaccccctggaacttcgaggaggtggtggacaagggcgcctccgcccagtccttcatcgagcggatgaccaacttcgacaagaacctgcccaacgagaaggtgctgcccaagcactccctgctgtacgagtacttcaccgtgtacaacgagctgaccaaggtgaagtacgtgaccgagggcatgcggaagcccgccttcctgtccggcgagcagaagaaggccatcgtggacctgctgttcaagaccaaccggaaggtgaccgtgaagcagctgaaggaggactacttcaagaagatcgagtgcttcgactccgtggagatctccggcgtggaggaccggttcaacgcctccctgggcacctaccacgacctgctgaagatcatcaaggacaaggacttcctggacaacgaggagaacgaggacatcctggaggacatcgtgctgaccctgaccctgttcgaggaccgggagatgatcgaggagcggctgaagacctacgcccacctgttcgacgacaaggtgatgaagcagctgaagcggcggcggtacaccggctggggccggctgtcccggaagctgatcaacggcatccgggacaagcagtccggcaagaccatcctggacttcctgaagtccgacggcttcgccaaccggaacttcatgcagctgatccacgacgactccctgaccttcaaggaggacatccagaaggcccaggtgtccggccagggcgactccctgcacgagcacatcgccaacctggccggctcccccgccatcaagaagggcatcctgcagaccgtgaaggtggtggacgagctggtgaaggtgatgggccggcacaagcccgagaacatcgtgatcgagatggcccgggagaaccagaccacccagaagggccagaagaactcccgggagcggatgaagcggatcgaggagggcatcaaggagctgggctcccagatcctgaaggagcaccccgtggagaacacccagctgcagaacgagaagctgtacctgtactacctgcagaacggccgggacatgtacgtggaccaggagctggacatcaaccggctgtccgactacgacgtggaccacatcgtgccccagtccttcctgaaggacgactccatcgacaacaaggtgctgacccggtccgacaagaaccggggcaagtccgacaacgtgccctccgaggaggtggtgaagaagatgaagaactactggcggcagctgctgaacgccaagctgatcacccagcggaagttcgacaacctgaccaaggccgagcggggcggcctgtccgagctggacaaggccggcttcatcaagcggcagctggtggagacccggcagatcaccaagcacgtggcccagatcctggactcccggatgaacaccaagtacgacgagaacgacaagctgatccgggaggtgaaggtgatcaccctgaagtccaagctggtgtccgacttccggaaggacttccagttctacaaggtgcgggagatcaacaactaccaccacgcccacgacgcctacctgaacgccgtggtgggcaccgccctgatcaagaagtaccccaagctggagtccgagttcgtgtacggcgactacaaggtgtacgacgtgcggaagatgatcgccaagtccgagcaggagatcggcaaggccaccgccaagtacttcttctactccaacatcatgaacttcttcaagaccgagatcaccctggccaacggcgagatccggaagcggcccctgatcgagaccaacggcgagaccggcgagatcgtgtgggacaagggccgggacttcgccaccgtgcggaaggtgctgtccatgccccaggtgaacatcgtgaagaagaccgaggtgcagaccggcggcttctccaaggagtccatcctgcccaagcggaactccgacaagctgatcgcccggaagaaggactgggaccccaagaagtacggcggcttcgactcccccaccgtggcctactccgtgctggtggtggccaaggtggagaagggcaagtccaagaagctgaagtccgtgaaggagctgctgggcatcaccatcatggagcggtcctccttcgagaagaaccccatcgacttcctggaggccaagggctacaaggaggtgaagaaggacctgatcatcaagctgcccaagtactccctgttcgagctggagaacggccggaagcggatgctggcctccgccggcgagctgcagaagggcaacgagctggccctgccctccaagtacgtgaacttcctgtacctggcctcccactacgagaagctgaagggctcccccgaggacaacgagcagaagcagctgttcgtggagcagcacaagcactacctggacgagatcatcgagcagatctccgagttctccaagcgggtgatcctggccgacgccaacctggacaaggtgctgtccgcctacaacaagcaccgggacaagcccatccgggagcaggccgagaacatcatccacctgttcaccctgaccaacctgggcgcccccgccgccttcaagtacttcgacaccaccatcgaccggaagcggtacacctccaccaaggaggtgctggacgccaccctgatccaccagtccatcaccggcctgtacgagacccggatcgacctgtcccagctgggcggcgacggcggcggctcccccaagaagaagcggaaggtgtccgagtccgccacccccgagtccgtgtccggctggcggctgttcaagaagatctcctga

SEQ ID NO: 24 - protein, 1398 aa, synthetic construct
  REGION 1..1398: note = Synthetic
MDKKYSIGLDIGTNSVGWAVITDEYKVPSKKFKVLGNTDRHSIKKNLIGALLFDSGETAEATRLKRTARRRYTRRKNRICYLQEIFSNEMAKVDDSFFHRLEESFLVEEDKKHERHPIFGNIVDEVAYHEKYPTIYHLRKKLVDSTDKADLRLIYLALAHMIKFRGHFLIEGDLNPDNSDVDKLFIQLVQTYNQLFEENPINASGVDAKAILSARLSKSRRLENLIAQLPGEKKNGLFGNLIALSLGLTPNFKSNFDLAEDAKLQLSKDTYDDDLDNLLAQIGDQYADLFLAAKNLSDAILLSDILRVNTEITKAPLSASMIKRYDEHHQDLTLLKALVRQQLPEKYKEIFFDQSKNGYAGYIDGGASQEEFYKFIKPILEKMDGTEELLVKLNREDLLRKQRTFDNGSIPHQIHLGELHAILRRQEDFYPFLKDNREKIEKILTFRIPYYVGPLARGNSRFAWMTRKSEETITPWNFEEVVDKGASAQSFIERMTNFDKNLPNEKVLPKHSLLYEYFTVYNELTKVKYVTEGMRKPAFLSGEQKKAIVDLLFKTNRKVTVKQLKEDYFKKIECFDSVEISGVEDRFNASLGTYHDLLKIIKDKDFLDNEENEDILEDIVLTLTLFEDREMIEERLKTYAHLFDDKVMKQLKRRRYTGWGRLSRKLINGIRDKQSGKTILDFLKSDGFANRNFMQLIHDDSLTFKEDIQKAQVSGQGDSLHEHIANLAGSPAIKKGILQTVKVVDELVKVMGRHKPENIVIEMARENQTTQKGQKNSRERMKRIEEGIKELGSQILKEHPVENTQLQNEKLYLYYLQNGRDMYVDQELDINRLSDYDVDHIVPQSFLKDDSIDNKVLTRSDKNRGKSDNVPSEEVVKKMKNYWRQLLNAKLITQRKFDNLTKAERGGLSELDKAGFIKRQLVETRQITKHVAQILDSRMNTKYDENDKLIREVKVITLKSKLVSDFRKDFQFYKVREINNYHHAHDAYLNAVVGTALIKKYPKLESEFVYGDYKVYDVRKMIAKSEQEIGKATAKYFFYSNIMNFFKTEITLANGEIRKRPLIETNGETGEIVWDKGRDFATVRKVLSMPQVNIVKKTEVQTGGFSKESILPKRNSDKLIARKKDWDPKKYGGFDSPTVAYSVLVVAKVEKGKSKKLKSVKELLGITIMERSSFEKNPIDFLEAKGYKEVKKDLIIKLPKYSLFELENGRKRMLASAGELQKGNELALPSKYVNFLYLASHYEKLKGSPEDNEQKQLFVEQHKHYLDEIIEQISEFSKRVILADANLDKVLSAYNKHRDKPIREQAENIIHLFTLTNLGAPAAFKYFDTTIDRKRYTSTKEVLDATLIHQSITGLYETRIDLSQLGGDGGGSPKKKRKVSESATPESVSGWRLFKKIS

SEQ ID NO: 25 - RNA, 589 nt, synthetic construct
  misc_feature 1..589: note = Synthetic
  source 1..589: mol_type = other RNA
gggagacccaagctggctagctcccgcagtcggcgtccagcggctctgcttgttcgtgtgtgtgtcgttgcaggccttattcggatccgccaccatgggaccgaagaagaagagaaaggtcggaggaggaagcacaaacctgtcggacatcatcgaaaaggaaacaggaaagcagctggtcatccaggaatcgatcctgatgctgccggaagaagtcgaagaagtcatcggaaacaagccggaatcggacatcctggtccacacagcatacgacgaatcgacagacgaaaacgtcatgctgctgacatcggacgcaccggaatacaagccgtgggcactggtcatccaggactcgaacggagaaaacaagatcaagatgctgtgatagtctagacatcacatttaaaagcatctcagcctaccatgagaataagagaaagaaaatgaagatcaatagcttattcatctctttttctttttcgttggtgtaaagccaacaccctgtctaaaaaacataaatttctttaatcattttgcctcttttctctgtgcttcaattaataaaaaatggaaagaacctcgagtctag

SEQ ID NO: 26 - RNA, 291 nt, synthetic construct
  misc_feature 1..291: note = Synthetic
  source 1..291: mol_type = other RNA
atgggaccgaagaagaagagaaaggtcggaggaggaagcacaaacctgtcggacatcatcgaaaaggaaacaggaaagcagctggtcatccaggaatcgatcctgatgctgccggaagaagtcgaagaagtcatcggaaacaagccggaatcggacatcctggtccacacagcatacgacgaatcgacagacgaaaacgtcatgctgctgacatcggacgcaccggaatacaagccgtgggcactggtcatccaggactcgaacggagaaaacaagatcaagatgctgtga

SEQ ID NO: 27 - protein, 107 aa, synthetic construct
  REGION 1..107: note = Synthetic
MTNLSDIIEKETGKQLVIQESILMLPEEVEEVIGNKPESDILVHTAYDESTDENVMLLTSDAPEYKPWALVIQDSNGENKIKMLSGGSKRTADGSEFESPKKKRKVE

SEQ ID NO: 28 - RNA, 5933 nt, synthetic construct
  misc_feature 1..5933: note = Synthetic
  source 1..5933: mol_type = other RNA
gggaagctcagaataaacgctcaactttggccggatctgccaccatggaggcctcccccgcctccggcccccggcacctgatggacccccacatcttcacctccaacttcaacaacggcatcggccggcacaagacctacctgtgctacgaggtggagcggctggacaacggcacctccgtgaagatggaccagcaccggggcttcctgcacaaccaggccaagaacctgctgtgcggcttctacggccggcacgccgagctgcggttcctggacctggtgccctccctgcagctggaccccgcccagatctaccgggtgacctggttcatctcctggtccccctgcttctcctggggctgcgccggcgaggtgcgggccttcctgcaggagaacacccacgtgcggctgcggatcttcgccgcccggatctacgactacgaccccctgtacaaggaggccctgcagatgctgcgggacgccggcgcccaggtgtccatcatgacctacgacgagttcaagcactgctgggacaccttcgtggaccaccagggctgccccttccagccctgggacggcctggacgagcactcccaggccctgtccggccggctgcgggccatcctgcagaaccagggcaactccggctccgagacccccggcacctccgagtccgccacccccgagtccgacaagaagtactccatcggcctggccatcggcaccaactccgtgggctgggccgtgatcaccgacgagtacaaggtgccctccaagaagttcaaggtgctgggcaacaccgaccggcactccatcaagaagaacctgatcggcgccctgctgttcgactccggcgagaccgccgaggccacccggctgaagcggaccgcccggcggcggtacacccggcggaagaaccggatctgctacctgcaggagatcttctccaacgagatggccaaggtggacgactccttcttccaccggctggaggagtccttcctggtggaggaggacaagaagcacgagcggcaccccatcttcggcaacatcgtggacgaggtggcctaccacgagaagtaccccaccatctaccacctgcggaagaagctggtggactccaccgacaaggccgacctgcggctgatctacctggccctggcccacatgatcaagttccggggccacttcctgatcgagggcgacctgaaccccgacaactccgacgtggacaagctgttcatccagctggtgcagacctacaaccagctgttcgaggagaaccccatcaacgcctccggcgtggacgccaaggccatcctgtccgcccggctgtccaagtcccggcggctggagaacctgatcgcccagctgcccggcgagaagaagaacggcctgttcggcaacctgatcgccctgtccctgggcctgacccccaacttcaagtccaacttcgacctggccgaggacgccaagctgcagctgtccaaggacacctacgacgacgacctggacaacctgctggcccagatcggcgaccagtacgccgacctgttcctggccgccaagaacctgtccgacgccatcctgctgtccgacatcctgcgggtgaacaccgagatcaccaaggcccccctgtccgcctccatgatcaagcggtacgacgagcaccaccaggacctgaccctgctgaaggccctggtgcggcagcagctgcccgagaagtacaaggagatcttcttcgaccagtccaagaacggctacgccggctacatcgacggcggcgcctcccaggaggagttctacaagttcatcaagcccatcctggagaagatggacggcaccgaggagctgctggtgaagctgaaccgggaggacctgctgcggaagcagcggaccttcgacaacggctccatcccccaccagatccacctgggcgagctgcacgccatcctgcggcggcaggaggacttctaccccttcctgaaggacaaccgggagaagatcgagaagatcctgaccttccggatcccctactacgtgggccccctggcccggggcaactcccggttcgcctggatgacccggaagtccgaggagaccatcaccccctggaacttcgaggaggtggtggacaagggcgcctccgcccagtccttcatcgagcggatgaccaacttcgacaagaacctgcccaacgagaaggtgctgcccaagcactccctgctgtacgagtacttcaccgtgtacaacgagctgaccaaggtgaagtacgtgaccgagggcatgcggaagcccgccttcctgtccggcgagcagaagaaggccatcgtggacctgctgttcaagaccaaccggaaggtgaccgtgaagcagctgaaggaggactacttcaagaagatcgagtgcttcgactccgtggagatctccggcgtggaggaccggttcaacgcctccctgggcacctaccacgacctgctgaagatcatcaaggacaaggacttcctggacaacgaggagaacgaggacatcctggaggacatcgtgctgaccctgaccctgttcgaggaccgggagatgatcgaggagcggctgaagacctacgcccacctgttcgacgacaaggtgatgaagcagctgaagcggcggcggtacaccggctggggccggctgtcccggaagctgatcaacggcatccgggacaagcagtccggcaagaccatcctggacttcctgaagtccgacggcttcgccaaccggaacttcatgcagctgatccacgacgactccctgaccttcaaggaggacatccagaaggcccaggtgtccggccagggcgactccctgcacgagcacatcgccaacctggccggctcccccgccatcaagaagggcatcctgcagaccgtgaaggtggtggacgagctggtgaaggtgatgggccggcacaagcccgagaacatcgtgatcgagatggcccgggagaaccagaccacccagaagggccagaagaactcccgggagcggatgaagcggatcgaggagggcatcaaggagctgggctcccagatcctgaaggagcaccccgtggagaacacccagctgcagaacgagaagctgtacctgtactacctgcagaacggccgggacatgtacgtggaccaggagctggacatcaaccggctgtccgactacgacgtggaccacatcgtgccccagtccttcctgaaggacgactccatcgacaacaaggtgctgacccggtccgacaagaaccggggcaagtccgacaacgtgccctccgaggaggtggtgaagaagatgaagaactactggcggcagctgctgaacgccaagctgatcacccagcggaagttcgacaacctgaccaaggccgagcggggcggcctgtccgagctggacaaggccggcttcatcaagcggcagctggtggagacccggcagatcaccaagcacgtggcccagatcctggactcccggatgaacaccaagtacgacgagaacgacaagctgatccgggaggtgaaggtgatcaccctgaagtccaagctggtgtccgacttccggaaggacttccagttctacaaggtgcgggagatcaacaactaccaccacgcccacgacgcctacctgaacgccgtggtgggcaccgccctgatcaagaagtaccccaagctggagtccgagttcgtgtacggcgactacaaggtgtacgacgtgcggaagatgatcgccaagtccgagcaggagatcggcaaggccaccgccaagtacttcttctactccaacatcatgaacttcttcaagaccgagatcaccctggccaacggcgagatccggaagcggcccctgatcgagaccaacggcgagaccggcgagatcgtgtgggacaagggccgggacttcgccaccgtgcggaaggtgctgtccatgccccaggtgaacatcgtgaagaagaccgaggtgcagaccggcggcttctccaaggagtccatcctgcccaagcggaactccgacaagctgatcgcccggaagaaggactgggaccccaagaagtacggcggcttcgactcccccaccgtggcctactccgtgctggtggtggccaaggtggagaagggcaagtccaagaagctgaagtccgtgaaggagctgctgggcatcaccatcatggagcggtcctccttcgagaagaaccccatcgacttcctggaggccaagggctacaaggaggtgaagaaggacctgatcatcaagctgcccaagtactccctgttcgagctggagaacggccggaagcggatgctggcctccgccggcgagctgcagaagggcaacgagctggccctgccctccaagtacgtgaacttcctgtacctggcctcccactacgagaagctgaagggctcccccgaggacaacgagcagaagcagctgttcgtggagcagcacaagcactacctggacgagatcatcgagcagatctccgagttctccaagcgggtgatcctggccgacgccaacctggacaaggtgctgtccgcctacaacaagcaccgggacaagcccatccgggagcaggccgagaacatcatccacctgttcaccctgaccaacctgggcgcccccgccgccttcaagtacttcgacaccaccatcgaccggaagcggtacacctccaccaaggaggtgctggacgccaccctgatccaccagtccatcaccggcctgtacgagacccggatcgacctgtcccagctgggcggcgactccggcggctccggcggctccggcggctccaccaacctgtccgacatcatcgagaaggagaccggcaagcagctggtgatccaggagtccatcctgatgctgcccgaggaggtggaggaggtgatcggcaacaagcccgagtccgacatcctggtgcacaccgcctacgacgagtccaccgacgagaacgtgatgctgctgacctccgacgcccccgagtacaagccctgggccctggtgatccaggactccaacggcgagaacaagatcaagatgctgtccggcggctccggcggctccggcggctccaccaacctgtccgacatcatcgagaaggagaccggcaagcagctggtgatccaggagtccatcctgatgctgcccgaggaggtggaggaggtgatcggcaacaagcccgagtccgacatcctggtgcacaccgcctacgacgagtccaccgacgagaacgtgatgctgctgacctccgacgcccccgagtacaagccctgggccctggtgatccaggactccaacggcgagaacaagatcaagatgctgtccggcggctccaagcggaccgccgacggctccgagttcgagcccaagaagaagcggaaggtgtgatagctagcaccagcctcaagaacacccgaatggagtctctaagctacataataccaacttacactttacaaaatgttgtcccccaaaatgtagccattcgtatctgctcctaataaaaagaaagtttcttcacattctctcgagaaaaaaaaaaaatggaaaaaaaaaaaacggaaaaaaaaaaaaggtaaaaaaaaaaaatataaaaaaaaaaaacataaaaaaaaaaaacgaaaaaaaaaaaacgtaaaaaaaaaaaactcaaaaaaaaaaaagataaaaaaaaaaaacctaaaaaaaaaaaatgtaaaaaaaaaaaagggaaaaaaaaaaaacgcaaaaaaaaaaaacacaaaaaaaaaaaatgcaaaaaaaaaaaatcgaaaaaaaaaaaatctaaaaaaaaaaaacgaaaaaaaaaaaacccaaaaaaaaaaaagacaaaaaaaaaaaatagaaaaaaaaaaaagttaaaaaaaaaaaactgaaaaaaaaaaaatttaaaaaaaaaaaatctag

SEQ ID NO: 29 - RNA, 5373 nt, synthetic construct
  misc_feature 1..5373: note = Synthetic
  source 1..5373: mol_type = other RNA
atggaggcctcccccgcctccggcccccggcacctgatggacccccacatcttcacctccaacttcaacaacggcatcggccggcacaagacctacctgtgctacgaggtggagcggctggacaacggcacctccgtgaagatggaccagcaccggggcttcctgcacaaccaggccaagaacctgctgtgcggcttctacggccggcacgccgagctgcggttcctggacctggtgccctccctgcagctggaccccgcccagatctaccgggtgacctggttcatctcctggtccccctgcttctcctggggctgcgccggcgaggtgcgggccttcctgcaggagaacacccacgtgcggctgcggatcttcgccgcccggatctacgactacgaccccctgtacaaggaggccctgcagatgctgcgggacgccggcgcccaggtgtccatcatgacctacgacgagttcaagcactgctgggacaccttcgtggaccaccagggctgccccttccagccctgggacggcctggacgagcactcccaggccctgtccggccggctgcgggccatcctgcagaaccagggcaactccggctccgagacccccggcacctccgagtccgccacccccgagtccgacaagaagtactccatcggcctggccatcggcaccaactccgtgggctgggccgtgatcaccgacgagtacaaggtgccctccaagaagttcaaggtgctgggcaacaccgaccggcactccatcaagaagaacctgatcggcgccctgctgttcgactccggcgagaccgccgaggccacccggctgaagcggaccgcccggcggcggtacacccggcggaagaaccggatctgctacctgcaggagatcttctccaacgagatggccaaggtggacgactccttcttccaccggctggaggagtccttcctggtggaggaggacaagaagcacgagcggcaccccatcttcggcaacatcgtggacgaggtggcctaccacgagaagtaccccaccatctaccacctgcggaagaagctggtggactccaccgacaaggccgacctgcggctgatctacctggccctggcccacatgatcaagttccggggccacttcctgatcgagggcgacctgaaccccgacaactccgacgtggacaagctgttcatccagctggtgcagacctacaaccagctgttcgaggagaaccccatcaacgcctccggcgtggacgccaaggccatcctgtccgcccggctgtccaagtcccggcggctggagaacctgatcgcccagctgcccggcgagaagaagaacggcctgttcggcaacctgatcgccctgtccctgggcctgacccccaacttcaagtccaacttcgacctggccgaggacgccaagctgcagctgtccaaggacacctacgacgacgacctggacaacctgctggcccagatcggcgaccagtacgccgacctgttcctggccgccaagaacctgtccgacgccatcctgctgtccgacatcctgcgggtgaacaccgagatcaccaaggcccccctgtccgcctccatgatcaagcggtacgacgagcaccaccaggacctgaccctgctgaaggccctggtgcggcagcagctgcccgagaagtacaaggagatcttcttcgaccagtccaagaacggctacgccggctacatcgacggcggcgcctcccaggaggagttctacaagttcatcaagcccatcctggagaagatggacggcaccgaggagctgctggtgaagctgaaccgggaggacctgctgcggaagcagcggaccttcgacaacggctccatcccccaccagatccacctgggcgagctgcacgccatcctgcggcggcaggaggacttctaccccttcctgaaggacaaccgggagaagatcgagaagatcctgaccttccggatcccctactacgtgggccccctggcccggggcaactcccggttcgcctggatgacccggaagtccgaggagaccatcaccccctggaacttcgaggaggtggtggacaagggcgcctccgcccagtccttcatcgagcggatgaccaacttcgacaagaacctgcccaacgagaaggtgctgcccaagcactccctgctgtacgagtacttcaccgtgtacaacgagctgaccaaggtgaagtacgtgaccgagggcatgcggaagcccgccttcctgtccggcgagcagaagaaggccatcgtggacctgctgttcaagaccaaccggaaggtgaccgtgaagcagctgaaggaggactacttcaagaagatcgagtgcttcgactccgtggagatctccggcgtggaggaccggttcaacgcctccctgggcacctaccacgacctgctgaagatcatcaaggacaaggacttcctggacaacgaggagaacgaggacatcctggaggacatcgtgctgaccctgaccctgttcgaggaccgggagatgatcgaggagcggctgaagacctacgcccacctgttcgacgacaaggtgatgaagcagctgaagcggcggcggtacaccggctggggccggctgtcccggaagctgatcaacggcatccgggacaagcagtccggcaagaccatcctggacttcctgaagtccgacggcttcgccaaccggaacttcatgcagctgatccacgacgactccctgaccttcaaggaggacatccagaaggcccaggtgtccggccagggcgactccctgcacgagcacatcgccaacctggccggctcccccgccatcaagaagggcatcctgcagaccgtgaaggtggtggacgagctggtgaaggtgatgggccggcacaagcccgagaacatcgtgatcgagatggcccgggagaaccagaccacccagaagggccagaagaactcccgggagcggatgaagcggatcgaggagggcatcaaggagctgggctcccagatcctgaaggagcaccccgtggagaacacccagctgcagaacgagaagctgtacctgtactacctgcagaacggccgggacatgtacgtggaccaggagctggacatcaaccggctgtccgactacgacgtggaccacatcgtgccccagtccttcctgaaggacgactccatcgacaacaaggtgctgacccggtccgacaagaaccggggcaagtccgacaacgtgccctccgaggaggtggtgaagaagatgaagaactactggcggcagctgctgaacgccaagctgatcacccagcggaagttcgacaacctgaccaaggccgagcggggcggcctgtccgagctggacaaggccggcttcatcaagcggcagctggtggagacccggcagatcaccaagcacgtggcccagatcctggactcccggatgaacaccaagtacgacgagaacgacaagctgatccgggaggtgaaggtgatcaccctgaagtccaagctggtgtccgacttccggaaggacttccagttctacaaggtgcgggagatcaacaactaccaccacgcccacgacgcctacctgaacgccgtggtgggcaccgccctgatcaagaagtaccccaagctggagtccgagttcgtgtacggcgactacaaggtgtacgacgtgcggaagatgatcgccaagtccgagcaggagatcggcaaggccaccgccaagtacttcttctactccaacatcatgaacttcttcaagaccgagatcaccctggccaacggcgagatccggaagcggcccctgatcgagaccaacggcgagaccggcgagatcgtgtgggacaagggccgggacttcgccaccgtgcggaaggtgctgtccatgccccaggtgaacatcgtgaagaagaccgaggtgcagaccggcggcttctccaaggagtccatcctgcccaagcggaactccgacaagctgatcgcccggaagaaggactgggaccccaagaagtacggcggcttcgactcccccaccgtggcctactccgtgctggtggtggccaaggtggagaagggcaagtccaagaagctgaagtccgtgaaggagctgctgggcatcaccatcatggagcggtcctccttcgagaagaaccccatcgacttcctggaggccaagggctacaaggaggtgaagaaggacctgatcatcaagctgcccaagtactccctgttcgagctggagaacggccggaagcggatgctggcctccgccggcgagctgcagaagggcaacgagctggccctgccctccaagtacgtgaacttcctgtacctggcctcccactacgagaagctgaagggctcccccgaggacaacgagcagaagcagctgttcgtggagcagcacaagcactacctggacgagatcatcgagcagatctccgagttctccaagcgggtgatcctggccgacgccaacctggacaaggtgctgtccgcctacaacaagcaccgggacaagcccatccgggagcaggccgagaacatcatccacctgttcaccctgaccaacctgggcgcccccgccgccttcaagtacttcgacaccaccatcgaccggaagcggtacacctccaccaaggaggtgctggacgccaccctgatccaccagtccatcaccggcctgtacgagacccggatcgacctgtcccagctgggcggcgactccggcggctccggcggctccggcggctccaccaacctgtccgacatcatcgagaaggagaccggcaagcagctggtgatccaggagtccatcctgatgctgcccgaggaggtggaggaggtgatcggcaacaagcccgagtccgacatcctggtgcacaccgcctacgacgagtccaccgacgagaacgtgatgctgctgacctccgacgcccccgagtacaagccctgggccctggtgatccaggactccaacggcgagaacaagatcaagatgctgtccggcggctccggcggctccggcggctccaccaacctgtccgacatcatcgagaaggagaccggcaagcagctggtgatccaggagtccatcctgatgctgcccgaggaggtggaggaggtgatcggcaacaagcccgagtccgacatcctggtgcacaccgcctacgacgagtccaccgacgagaacgtgatgctgctgacctccgacgcccccgagtacaagccctgggccctggtgatccaggactccaacggcgagaacaagatcaagatgctgtccggcggctccaagcggaccgccgacggctccgagttcgagcccaagaagaagcggaaggtgtgatag

SEQ ID NO: 30 - protein, 1789 aa, synthetic construct
  REGION 1..1789: note = Synthetic
MEASPASGPRHLMDPHIFTSNFNNGIGRHKTYLCYEVERLDNGTSVKMDQHRGFLHNQAKNLLCGFYGRHAELRFLDLVPSLQLDPAQIYRVTWFISWSPCFSWGCAGEVRAFLQENTHVRLRIFAARIYDYDPLYKEALQMLRDAGAQVSIMTYDEFKHCWDTFVDHQGCPFQPWDGLDEHSQALSGRLRAILQNQGNSGSETPGTSESATPESDKKYSIGLAIGTNSVGWAVITDEYKVPSKKFKVLGNTDRHSIKKNLIGALLFDSGETAEATRLKRTARRRYTRRKNRICYLQEIFSNEMAKVDDSFFHRLEESFLVEEDKKHERHPIFGNIVDEVAYHEKYPTIYHLRKKLVDSTDKADLRLIYLALAHMIKFRGHFLIEGDLNPDNSDVDKLFIQLVQTYNQLFEENPINASGVDAKAILSARLSKSRRLENLIAQLPGEKKNGLFGNLIALSLGLTPNFKSNFDLAEDAKLQLSKDTYDDDLDNLLAQIGDQYADLFLAAKNLSDAILLSDILRVNTEITKAPLSASMIKRYDEHHQDLTLLKALVRQQLPEKYKEIFFDQSKNGYAGYIDGGASQEEFYKFIKPILEKMDGTEELLVKLNREDLLRKQRTFDNGSIPHQIHLGELHAILRRQEDFYPFLKDNREKIEKILTFRIPYYVGPLARGNSRFAWMTRKSEETITPWNFEEVVDKGASAQSFIERMTNFDKNLPNEKVLPKHSLLYEYFTVYNELTKVKYVTEGMRKPAFLSGEQKKAIVDLLFKTNRKVTVKQLKEDYFKKIECFDSVEISGVEDRFNASLGTYHDLLKIIKDKDFLDNEENEDILEDIVLTLTLFEDREMIEERLKTYAHLFDDKVMKQLKRRRYTGWGRLSRKLINGIRDKQSGKTILDFLKSDGFANRNFMQLIHDDSLTFKEDIQKAQVSGQGDSLHEHIANLAGSPAIKKGILQTVKVVDELVKVMGRHKPENIVIEMARENQTTQKGQKNSRERMKRIEEGIKELGSQILKEHPVENTQLQNEKLYLYYLQNGRDMYVDQELDINRLSDYDVDHIVPQSFLKDDSIDNKVLTRSDKNRGKSDNVPSEEVVKKMKNYWRQLLNAKLITQRKFDNLTKAERGGLSELDKAGFIKRQLVETRQITKHVAQILDSRMNTKYDENDKLIREVKVITLKSKLVSDFRKDFQFYKVREINNYHHAHDAYLNAVVGTALIKKYPKLESEFVYGDYKVYDVRKMIAKSEQEIGKATAKYFFYSNIMNFFKTEITLANGEIRKRPLIETNGETGEIVWDKGRDFATVRKVLSMPQVNIVKKTEVQTGGFSKESILPKRNSDKLIARKKDWDPKKYGGFDSPTVAYSVLVVAKVEKGKSKKLKSVKELLGITIMERSSFEKNPIDFLEAKGYKEVKKDLIIKLPKYSLFELENGRKRMLASAGELQKGNELALPSKYVNFLYLASHYEKLKGSPEDNEQKQLFVEQHKHYLDEIIEQISEFSKRVILADANLDKVLSAYNKHRDKPIREQAENIIHLFTLTNLGAPAAFKYFDTTIDRKRYTSTKEVLDATLIHQSITGLYETRIDLSQLGGDSGGSGGSGGSTNLSDIIEKETGKQLVIQESILMLPEEVEEVIGNKPESDILVHTAYDESTDENVMLLTSDAPEYKPWALVIQDSNGENKIKMLSGGSGGSGGSTNLSDIIEKETGKQLVIQESILMLPEEVEEVIGNKPESDILVHTAYDESTDENVMLLTSDAPEYKPWALVIQDSNGENKIKMLSGGSKRTADGSEFEPKKKRKV

SEQ ID NO: 31 - RNA, 6125 nt, synthetic construct
  misc_feature 1..6125: note = Synthetic
  source 1..6125: mol_type = other RNA
gggaagctcagaataaacgctcaactttggccggatctgccaccatgaagcggaccgccgacggctccgagttcgagtcccccaagaagaagcggaaggtgtcctccgagaccggccccgtggccgtggaccccaccctgcggcggcggatcgagccccacgagttcgaggtgttcttcgacccccgggagctgcggaaggagacctgcctgctgtacgagatcaactggggcggccggcactccatctggcggcacacctcccagaacaccaacaagcacgtggaggtgaacttcatcgagaagttcaccaccgagcggtacttctgccccaacacccggtgctccatcacctggttcctgtcctggtccccctgcggcgagtgctcccgggccatcaccgagttcctgtcccggtacccccacgtgaccctgttcatctacatcgcccggctgtaccaccacgccgacccccggaaccggcagggcctgcgggacctgatctcctccggcgtgaccatccagatcatgaccgagcaggagtccggctactgctggcggaacttcgtgaactactccccctccaacgaggcccactggccccggtacccccacctgtgggtgcggctgtacgtgctggagctgtactgcatcatcctgggcctgcccccctgcctgaacatcctgcggcggaagcagccccagctgaccttcttcaccatcgccctgcagtcctgccactaccagcggctgcccccccacatcctgtgggccaccggcctgaagtccggcggctcctccggcggctcctccggctccgagacccccggcacctccgagtccgccacccccgagtcctccggcggctcctccggcggctccgacaagaagtactccatcggcctggccatcggcaccaactccgtgggctgggccgtgatcaccgacgagtacaaggtgccctccaagaagttcaaggtgctgggcaacaccgaccggcactccatcaagaagaacctgatcggcgccctgctgttcgactccggcgagaccgccgaggccacccggctgaagcggaccgcccggcggcggtacacccggcggaagaaccggatctgctacctgcaggagatcttctccaacgagatggccaaggtggacgactccttcttccaccggctggaggagtccttcctggtggaggaggacaagaagcacgagcggcaccccatcttcggcaacatcgtggacgaggtggcctaccacgagaagtaccccaccatctaccacctgcggaagaagctggtggactccaccgacaaggccgacctgcggctgatctacctggccctggcccacatgatcaagttccggggccacttcctgatcgagggcgacctgaaccccgacaactccgacgtggacaagctgttcatccagctggtgcagacctacaaccagctgttcgaggagaaccccatcaacgcctccggcgtggacgccaaggccatcctgtccgcccggctgtccaagtcccggcggctggagaacctgatcgcccagctgcccggcgagaagaagaacggcctgttcggcaacctgatcgccctgtccctgggcctgacccccaacttcaagtccaacttcgacctggccgaggacgccaagctgcagctgtccaaggacacctacgacgacgacctggacaacctgctggcccagatcggcgaccagtacgccgacctgttcctggccgccaagaacctgtccgacgccatcctgctgtccgacatcctgcgggtgaacaccgagatcaccaaggcccccctgtccgcctccatgatcaagcggtacgacgagcaccaccaggacctgaccctgctgaaggccctggtgcggcagcagctgcccgagaagtacaaggagatcttcttcgaccagtccaagaacggctacgccggctacatcgacggcggcgcctcccaggaggagttctacaagttcatcaagcccatcctggagaagatggacggcaccgaggagctgctggtgaagctgaaccgggaggacctgctgcggaagcagcggaccttcgacaacggctccatcccccaccagatccacctgggcgagctgcacgccatcctgcggcggcaggaggacttctaccccttcctgaaggacaaccgggagaagatcgagaagatcctgaccttccggatcccctactacgtgggccccctggcccggggcaactcccggttcgcctggatgacccggaagtccgaggagaccatcaccccctggaacttcgaggaggtggtggacaagggcgcctccgcccagtccttcatcgagcggatgaccaacttcgacaagaacctgcccaacgagaaggtgctgcccaagcactccctgctgtacgagtacttcaccgtgtacaacgagctgaccaaggtgaagtacgtgaccgagggcatgcggaagcccgccttcctgtccggcgagcagaagaaggccatcgtggacctgctgttcaagaccaaccggaaggtgaccgtgaagcagctgaaggaggactacttcaagaagatcgagtgcttcgactccgtggagatctccggcgtggaggaccggttcaacgcctccctgggcacctaccacgacctgctgaagatcatcaaggacaaggacttcctggacaacgaggagaacgaggacatcctggaggacatcgtgctgaccctgaccctgttcgaggaccgggagatgatcgaggagcggctgaagacctacgcccacctgttcgacgacaaggtgatgaagcagctgaagcggcggcggtacaccggctggggccggctgtcccggaagctgatcaacggcatccgggacaagcagtccggcaagaccatcctggacttcctgaagtccgacggcttcgccaaccggaacttcatgcagctgatccacgacgactccctgaccttcaaggaggacatccagaaggcccaggtgtccggccagggcgactccctgcacgagcacatcgccaacctggccggctcccccgccatcaagaagggcatcctgcagaccgtgaaggtggtggacgagctggtgaaggtgatgggccggcacaagcccgagaacatcgtgatcgagatggcccgggagaaccagaccacccagaagggccagaagaactcccgggagcggatgaagcggatcgaggagggcatcaaggagctgggctcccagatcctgaaggagcaccccgtggagaacacccagctgcagaacgagaagctgtacctgtactacctgcagaacggccgggacatgtacgtggaccaggagctggacatcaaccggctgtccgactacgacgtggaccacatcgtgccccagtccttcctgaaggacgactccatcgacaacaaggtgctgacccggtccgacaagaaccggggcaagtccgacaacgtgccctccgaggaggtggtgaagaagatgaagaactactggcggcagctgctgaacgccaagctgatcacccagcggaagttcgacaacctgaccaaggccgagcggggcggcctgtccgagctggacaaggccggcttcatcaagcggcagctggtggagacccggcagatcaccaagcacgtggcccagatcctggactcccggatgaacaccaagtacgacgagaacgacaagctgatccgggaggtgaaggtgatcaccctgaagtccaagctggtgtccgacttccggaaggacttccagttctacaaggtgcgggagatcaacaactaccaccacgcccacgacgcctacctgaacgccgtggtgggcaccgccctgatcaagaagtaccccaagctggagtccgagttcgtgtacggcgactacaaggtgtacgacgtgcggaagatgatcgccaagtccgagcaggagatcggcaaggccaccgccaagtacttcttctactccaacatcatgaacttcttcaagaccgagatcaccctggccaacggcgagatccggaagcggcccctgatcgagaccaacggcgagaccggcgagatcgtgtgggacaagggccgggacttcgccaccgtgcggaaggtgctgtccatgccccaggtgaacatcgtgaagaagaccgaggtgcagaccggcggcttctccaaggagtccatcctgcccaagcggaactccgacaagctgatcgcccggaagaaggactgggaccccaagaagtacggcggcttcgactcccccaccgtggcctactccgtgctggtggtggccaaggtggagaagggcaagtccaagaagctgaagtccgtgaaggagctgctgggcatcaccatcatggagcggtcctccttcgagaagaaccccatcgacttcctggaggccaagggctacaaggaggtgaagaaggacctgatcatcaagctgcccaagtactccctgttcgagctggagaacggccggaagcggatgctggcctccgccggcgagctgcagaagggcaacgagctggccctgccctccaagtacgtgaacttcctgtacctggcctcccactacgagaagctgaagggctcccccgaggacaacgagcagaagcagctgttcgtggagcagcacaagcactacctggacgagatcatcgagcagatctccgagttctccaagcgggtgatcctggccgacgccaacctggacaaggtgctgtccgcctacaacaagcaccgggacaagcccatccgggagcaggccgagaacatcatccacctgttcaccctgaccaacctgggcgcccccgccgccttcaagtacttcgacaccaccatcgaccggaagcggtacacctccaccaaggaggtgctggacgccaccctgatccaccagtccatcaccggcctgtacgagacccggatcgacctgtcccagctgggcggcgactccggcggctccggcggctccggcggctccaccaacctgtccgacatcatcgagaaggagaccggcaagcagctggtgatccaggagtccatcctgatgctgcccgaggaggtggaggaggtgatcggcaacaagcccgagtccgacatcctggtgcacaccgcctacgacgagtccaccgacgagaacgtgatgctgctgacctccgacgcccccgagtacaagccctgggccctggtgatccaggactccaacggcgagaacaagatcaagatgctgtccggcggctccggcggctccggcggctccaccaacctgtccgacatcatcgagaaggagaccggcaagcagctggtgatccaggagtccatcctgatgctgcccgaggaggtggaggaggtgatcggcaacaagcccgagtccgacatcctggtgcacaccgcctacgacgagtccaccgacgagaacgtgatgctgctgacctccgacgcccccgagtacaagccctgggccctggtgatccaggactccaacggcgagaacaagatcaagatgctgtccggcggctccaagcggaccgccgacggctccgagttcgagcccaagaagaagcggaaggtgtgatagctagcaccagcctcaagaacacccgaatggagtctctaagctacataataccaacttacactttacaaaatgttgtcccccaaaatgtagccattcgtatctgctcctaataaaaagaaagtttcttcacattctctcgagaaaaaaaaaaaatggaaaaaaaaaaaacggaaaaaaaaaaaaggtaaaaaaaaaaaatataaaaaaaaaaaacataaaaaaaaaaaacgaaaaaaaaaaaacgtaaaaaaaaaaaactcaaaaaaaaaaaagataaaaaaaaaaaacctaaaaaaaaaaaatgtaaaaaaaaaaaagggaaaaaaaaaaaacgcaaaaaaaaaaaacacaaaaaaaaaaaatgcaaaaaaaaaaaatcgaaaaaaaaaaaatctaaaaaaaaaaaacgaaaaaaaaaaaacccaaaaaaaaaaaagacaaaaaaaaaaaatagaaaaaaaaaaaagttaaaaaaaaaaaactgaaaaaaaaaaaatttaaaaaaaaaaaatctag

SEQ ID NO: 32 - RNA, 5565 nt, synthetic construct
  misc_feature 1..5565: note = Synthetic
  source 1..5565: mol_type = other RNA
atgaagcggaccgccgacggctccgagttcgagtcccccaagaagaagcggaaggtgtcctccgagaccggccccgtggccgtggaccccaccctgcggcggcggatcgagccccacgagttcgaggtgttcttcgacccccgggagctgcggaaggagacctgcctgctgtacgagatcaactggggcggccggcactccatctggcggcacacctcccagaacaccaacaagcacgtggaggtgaacttcatcgagaagttcaccaccgagcggtacttctgccccaacacccggtgctccatcacctggttcctgtcctggtccccctgcggcgagtgctcccgggccatcaccgagttcctgtcccggtacccccacgtgaccctgttcatctacatcgcccggctgtaccaccacgccgacccccggaaccggcagggcctgcgggacctgatctcctccggcgtgaccatccagatcatgaccgagcaggagtccggctactgctggcggaacttcgtgaactactccccctccaacgaggcccactggccccggtacccccacctgtgggtgcggctgtacgtgctggagctgtactgcatcatcctgggcctgcccccctgcctgaacatcctgcggcggaagcagccccagctgaccttcttcaccatcgccctgcagtcctgccactaccagcggctgcccccccacatcctgtgggccaccggcctgaagtccggcggctcctccggcggctcctccggctccgagacccccggcacctccgagtccgccacccccgagtcctccggcggctcctccggcggctccgacaagaagtactccatcggcctggccatcggcaccaactccgtgggctgggccgtgatcaccgacgagtacaaggtgccctccaagaagttcaaggtgctgggcaacaccgaccggcactccatcaagaagaacctgatcggcgccctgctgttcgactccggcgagaccgccgaggccacccggctgaagcggaccgcccggcggcggtacacccggcggaagaaccggatctgctacctgcaggagatcttctccaacgagatggccaaggtggacgactccttcttccaccggctggaggagtccttcctggtggaggaggacaagaagcacgagcggcaccccatcttcggcaacatcgtggacgaggtggcctaccacgagaagtaccccaccatctaccacctgcggaagaagctggtggactccaccgacaaggccgacctgcggctgatctacctggccctggcccacatgatcaagttccggggccacttcctgatcgagggcgacctgaaccccgacaactccgacgtggacaagctgttcatccagctggtgcagacctacaaccagctgttcgaggagaaccccatcaacgcctccggcgtggacgccaaggccatcctgtccgcccggctgtccaagtcccggcggctggagaacctgatcgcccagctgcccggcgagaagaagaacggcctgttcggcaacctgatcgccctgtccctgggcctgacccccaacttcaagtccaacttcgacctggccgaggacgccaagctgcagctgtccaaggacacctacgacgacgacctggacaacctgctggcccagatcggcgaccagtacgccgacctgttcctggccgccaagaacctgtccgacgccatcctgctgtccgacatcctgcgggtgaacaccgagatcaccaaggcccccctgtccgcctccatgatcaagcggtacgacgagcaccaccaggacctgaccctgctgaaggccctggtgcggcagcagctgcccgagaagtacaaggagatcttcttcgaccagtccaagaacggctacgccggctacatcgacggcggcgcctcccaggaggagttctacaagttcatcaagcccatcctggagaagatggacggcaccgaggagctgctggtgaagctgaaccgggaggacctgctgcggaagcagcggaccttcgacaacggctccatcccccaccagatccacctgggcgagctgcacgccatcctgcggcggcaggaggacttctaccccttcctgaaggacaaccgggagaagatcgagaagatcctgaccttccggatcccctactacgtgggccccctggcccggggcaactcccggttcgcctggatgacccggaagtccgaggagaccatcaccccctggaacttcgaggaggtggtggacaagggcgcctccgcccagtccttcatcgagcggatgaccaacttcgacaagaacctgcccaacgagaaggtgctgcccaagcactccctgctgtacgagtacttcaccgtgtacaacgagctgaccaaggtgaagtacgtgaccgagggcatgcggaagcccgccttcctgtccggcgagcagaagaaggccatcgtggacctgctgttcaagaccaaccggaaggtgaccgtgaagcagctgaaggaggactacttcaagaagatcgagtgcttcgactccgtggagatctccggcgtggaggaccggttcaacgcctccctgggcacctaccacgacctgctgaagatcatcaaggacaaggacttcctggacaacgaggagaacgaggacatcctggaggacatcgtgctgaccctgaccctgttcgaggaccgggagatgatcgaggagcggctgaagacctacgcccacctgttcgacgacaaggtgatgaagcagctgaagcggcggcggtacaccggctggggccggctgtcccggaagctgatcaacggcatccgggacaagcagtccggcaagaccatcctggacttcctgaagtccgacggcttcgccaaccggaacttcatgcagctgatccacgacgactccctgaccttcaaggaggacatccagaaggcccaggtgtccggccagggcgactccctgcacgagcacatcgccaacctggccggctcccccgccatcaagaagggcatcctgcagaccgtgaaggtggtggacgagctggtgaaggtgatgggccggcacaagcccgagaacatcgtgatcgagatggcccgggagaaccagaccacccagaagggccagaagaactcccgggagcggatgaagcggatcgaggagggcatcaaggagctgggctcccagatcctgaaggagcaccccgtggagaacacccagctgcagaacgagaagctgtacctgtactacctgcagaacggccgggacatgtacgtggaccaggagctggacatcaaccggctgtccgactacgacgtggaccacatcgtgccccagtccttcctgaaggacgactccatcgacaacaaggtgctgacccggtccgacaagaaccggggcaagtccgacaacgtgccctccgaggaggtggtgaagaagatgaagaactactggcggcagctgctgaacgccaagctgatcacccagcggaagttcgacaacctgaccaaggccgagcggggcggcctgtccgagctggacaaggccggcttcatcaagcggcagctggtggagacccggcagatcaccaagcacgtggcccagatcctggactcccggatgaacaccaagtacgacgagaacgacaagctgatccgggaggtgaaggtgatcaccctgaagtccaagctggtgtccgacttccggaaggacttccagttctacaaggtgcgggagatcaacaactaccaccacgcccacgacgcctacctgaacgccgtggtgggcaccgccctgatcaagaagtaccccaagctggagtccgagttcgtgtacggcgactacaaggtgtacgacgtgcggaagatgatcgccaagtccgagcaggagatcggcaaggccaccgccaagtacttcttctactccaacatcatgaacttcttcaagaccgagatcaccctggccaacggcgagatccggaagcggcccctgatcgagaccaacggcgagaccggcgagatcgtgtgggacaagggccgggacttcgccaccgtgcggaaggtgctgtccatgccccaggtgaacatcgtgaagaagaccgaggtgcagaccggcggcttctccaaggagtccatcctgcccaagcggaactccgacaagctgatcgcccggaagaaggactgggaccccaagaagtacggcggcttcgactcccccaccgtggcctactccgtgctggtggtggccaaggtggagaagggcaagtccaagaagctgaagtccgtgaaggagctgctgggcatcaccatcatggagcggtcctccttcgagaagaaccccatcgacttcctggaggccaagggctacaaggaggtgaagaaggacctgatcatcaagctgcccaagtactccctgttcgagctggagaacggccggaagcggatgctggcctccgccggcgagctgcagaagggcaacgagctggccctgccctccaagtacgtgaacttcctgtacctggcctcccactacgagaagctgaagggctcccccgaggacaacgagcagaagcagctgttcgtggagcagcacaagcactacctggacgagatcatcgagcagatctccgagttctccaagcgggtgatcctggccgacgccaacctggacaaggtgctgtccgcctacaacaagcaccgggacaagcccatccgggagcaggccgagaacatcatccacctgttcaccctgaccaacctgggcgcccccgccgccttcaagtacttcgacaccaccatcgaccggaagcggtacacctccaccaaggaggtgctggacgccaccctgatccaccagtccatcaccggcctgtacgagacccggatcgacctgtcccagctgggcggcgactccggcggctccggcggctccggcggctccaccaacctgtccgacatcatcgagaaggagaccggcaagcagctggtgatccaggagtccatcctgatgctgcccgaggaggtggaggaggtgatcggcaacaagcccgagtccgacatcctggtgcacaccgcctacgacgagtccaccgacgagaacgtgatgctgctgacctccgacgcccccgagtacaagccctgggccctggtgatccaggactccaacggcgagaacaagatcaagatgctgtccggcggctccggcggctccggcggctccaccaacctgtccgacatcatcgagaaggagaccggcaagcagctggtgatccaggagtccatcctgatgctgcccgaggaggtggaggaggtgatcggcaacaagcccgagtccgacatcctggtgcacaccgcctacgacgagtccaccgacgagaacgtgatgctgctgacctccgacgcccccgagtacaagccctgggccctggtgatccaggactccaacggcgagaacaagatcaagatgctgtccggcggctccaagcggaccgccgacggctccgagttcgagcccaagaagaagcggaaggtgtgatag

SEQ ID NO: 33 - protein, 1853 aa, synthetic construct
  REGION 1..1853: note = Synthetic
MKRTADGSEFESPKKKRKVSSETGPVAVDPTLRRRIEPHEFEVFFDPRELRKETCLLYEINWGGRHSIWRHTSQNTNKHVEVNFIEKFTTERYFCPNTRCSITWFLSWSPCGECSRAITEFLSRYPHVTLFIYIARLYHHADPRNRQGLRDLISSGVTIQIMTEQESGYCWRNFVNYSPSNEAHWPRYPHLWVRLYVLELYCIILGLPPCLNILRRKQPQLTFFTIALQSCHYQRLPPHILWATGLKSGGSSGGSSGSETPGTSESATPESSGGSSGGSDKKYSIGLAIGTNSVGWAVITDEYKVPSKKFKVLGNTDRHSIKKNLIGALLFDSGETAEATRLKRTARRRYTRRKNRICYLQEIFSNEMAKVDDSFFHRLEESFLVEEDKKHERHPIFGNIVDEVAYHEKYPTIYHLRKKLVDSTDKADLRLIYLALAHMIKFRGHFLIEGDLNPDNSDVDKLFIQLVQTYNQLFEENPINASGVDAKAILSARLSKSRRLENLIAQLPGEKKNGLFGNLIALSLGLTPNFKSNFDLAEDAKLQLSKDTYDDDLDNLLAQIGDQYADLFLAAKNLSDAILLSDILRVNTEITKAPLSASMIKRYDEHHQDLTLLKALVRQQLPEKYKEIFFDQSKNGYAGYIDGGASQEEFYKFIKPILEKMDGTEELLVKLNREDLLRKQRTFDNGSIPHQIHLGELHAILRRQEDFYPFLKDNREKIEKILTFRIPYYVGPLARGNSRFAWMTRKSEETITPWNFEEVVDKGASAQSFIERMTNFDKNLPNEKVLPKHSLLYEYFTVYNELTKVKYVTEGMRKPAFLSGEQKKAIVDLLFKTNRKVTVKQLKEDYFKKIECFDSVEISGVEDRFNASLGTYHDLLKIIKDKDFLDNEENEDILEDIVLTLTLFEDREMIEERLKTYAHLFDDKVMKQLKRRRYTGWGRLSRKLINGIRDKQSGKTILDFLKSDGFANRNFMQLIHDDSLTFKEDIQKAQVSGQGDSLHEHIANLAGSPAIKKGILQTVKVVDELVKVMGRHKPENIVIEMARENQTTQKGQKNSRERMKRIEEGIKELGSQILKEHPVENTQLQNEKLYLYYLQNGRDMYVDQELDINRLSDYDVDHIVPQSFLKDDSIDNKVLTRSDKNRGKSDNVPSEEVVKKMKNYWRQLLNAKLITQRKFDNLTKAERGGLSELDKAGFIKRQLVETRQITKHVAQILDSRMNTKYDENDKLIREVKVITLKSKLVSDFRKDFQFYKVREINNYHHAHDAYLNAVVGTALIKKYPKLESEFVYGDYKVYDVRKMIAKSEQEIGKATAKYFFYSNIMNFFKTEITLANGEIRKRPLIETNGETGEIVWDKGRDFATVRKVLSMPQVNIVKKTEVQTGGFSKESILPKRNSDKLIARKKDWDPKKYGGFDSPTVAYSVLVVAKVEKGKSKKLKSVKELLGITIMERSSFEKNPIDFLEAKGYKEVKKDLIIKLPKYSLFELENGRKRMLASAGELQKGNELALPSKYVNFLYLASHYEKLKGSPEDNEQKQLFVEQHKHYLDEIIEQISEFSKRVILADANLDKVLSAYNKHRDKPIREQAENIIHLFTLTNLGAPAAFKYFDTTIDRKRYTSTKEVLDATLIHQSITGLYETRIDLSQLGGDSGGSGGSGGSTNLSDIIEKETGKQLVIQESILMLPEEVEEVIGNKPESDILVHTAYDESTDENVMLLTSDAPEYKPWALVIQDSNGENKIKMLSGGSGGSGGSTNLSDIIEKETGKQLVIQESILMLPEEVEEVIGNKPESDILVHTAYDESTDENVMLLTSDAPEYKPWALVIQDSNGENKIKMLSGGSKRTADGSEFEPKKKRKV

SEQ ID NO: 34 - RNA, 887 nt, synthetic construct
  misc_feature 1..887: note = Synthetic
  source 1..887: mol_type = other RNA
gggaagctcagaataaacgctcaactttggccggatctgccaccatgaccaacctgtccgacatcatcgagaaggagaccggcaagcagctggtgatccaggagtccatcctgatgctgcccgaggaggtggaggaggtgatcggcaacaagcccgagtccgacatcctggtgcacaccgcctacgacgagtccaccgacgagaacgtgatgctgctgacctccgacgcccccgagtacaagccctgggccctggtgatccaggactccaacggcgagaacaagatcaagatgctgtccggcggctccaagcggaccgccgacggctccgagttcgagtcccccaagaagaagcggaaggtggagtgatagctagcaccagcctcaagaacacccgaatggagtctctaagctacataataccaacttacactttacaaaatgttgtcccccaaaatgtagccattcgtatctgctcctaataaaaagaaagtttcttcacattctctcgagaaaaaaaaaaaatggaaaaaaaaaaaacggaaaaaaaaaaaaggtaaaaaaaaaaaatataaaaaaaaaaaacataaaaaaaaaaaacgaaaaaaaaaaaacgtaaaaaaaaaaaactcaaaaaaaaaaaagataaaaaaaaaaaacctaaaaaaaaaaaatgtaaaaaaaaaaaagggaaaaaaaaaaaacgcaaaaaaaaaaaacacaaaaaaaaaaaatgcaaaaaaaaaaaatcgaaaaaaaaaaaatctaaaaaaaaaaaacgaaaaaaaaaaaacccaaaaaaaaaaaagacaaaaaaaaaaaatagaaaaaaaaaaaagttaaaaaaaaaaaactgaaaaaaaaaaaatttaaaaaaaaaaaatctag

SEQ ID NO: 35 - RNA, 324 nt, synthetic construct
  misc_feature 1..324: note = Synthetic
  source 1..324: mol_type = other RNA
atgaccaacctgtccgacatcatcgagaaggagaccggcaagcagctggtgatccaggagtccatcctgatgctgcccgaggaggtggaggaggtgatcggcaacaagcccgagtccgacatcctggtgcacaccgcctacgacgagtccaccgacgagaacgtgatgctgctgacctccgacgcccccgagtacaagccctgggccctggtgatccaggactccaacggcgagaacaagatcaagatgctgtccggcggctccaagcggaccgccgacggctccgagttcgagtcccccaagaagaagcggaaggtggagtga

SEQ ID NO: 36 - protein, 1379 aa, synthetic construct; identical to SEQ ID NO: 9
  REGION 1..1379: note = Synthetic

SEQ ID NO: 37-39 - skipped (3 entries)

SEQ ID NO: 40 - protein, 199 aa, Homo sapiens
MEASPASGPRHLMDPHIFTSNFNNGIGRHKTYLCYEVERLDNGTSVKMDQHRGFLHNQAKNLLCGFYGRHAELRFLDLVPSLQLDPAQIYRVTWFISWSPCFSWGCAGEVRAFLQENTHVRLRIFAARIYDYDPLYKEALQMLRDAGAQVSIMTYDEFKHCWDTFVDHQGCPFQPWDGLDEHSQALSGRLRAILQNQGN

SEQ ID NO: 41 - protein, 229 aa, R. norvegicus [sequence omitted]

SEQ ID NO: 42 - DNA, 249 bp, synthetic construct
  misc_feature 1..249: note = Synthetic
  source 1..249: mol_type = other DNA
actaatctgtcagatattattgaaaaggagaccggtaagcaactggttatccaggaatccatcctcatgctcccagaggaggtggaagaagtcattgggaacaagccggaaagcgatatactcgtgcacaccgcctacgacgagagcaccgacgagaatgtcatgcttctgactagcgacgcccctgaatacaagccttgggctctggtcatacaggatagcaacggtgagaacaagattaagatgctc

SEQ ID NO: 43 - protein, 83 aa, synthetic construct
  REGION 1..83: note = Synthetic
TNLSDIIEKETGKQLVIQESILMLPEEVEEVIGNKPESDILVHTAYDESTDENVMLLTSDAPEYKPWALVIQDSNGENKIKML

SEQ ID NO: 44 - DNA, 48 bp, synthetic construct
  misc_feature 1..48: note = Synthetic
  source 1..48: mol_type = other DNA
agcggcagcgagactccgggcacctcagagtccgccacacccgaaagt

SEQ ID NO: 45 - DNA, 48 bp, synthetic construct
  misc_feature 1..48: note = Synthetic
  source 1..48: mol_type = other DNA
agcggaagcgaaacaccgggaacaagcgaaagcgcaacaccggaaagc

SEQ ID NO: 46 - protein, 16 aa, synthetic construct
  REGION 1..16: note = Synthetic
SGSETPGTSESATPES

SEQ ID NO: 47 - protein, 12 aa, synthetic construct
  REGION 1..12: note = Synthetic
SGSETPGTSESA

SEQ ID NO: 48 - protein, 21 aa, synthetic construct
  REGION 1..21: note = Synthetic
SGSETPGTSESATPEGGSGGS

SEQ ID NO: 49 - protein, 15 aa, synthetic construct
  REGION 1..15: note = Synthetic
GGGGSEAAAKEAAAK

SEQ ID NO: 50 - protein, 15 aa, synthetic construct
  REGION 1..15: note = Synthetic
EAAAKGGGGSGGGGS

SEQ ID NO: 51 - protein, 15 aa, synthetic construct
  REGION 1..15: note = Synthetic
EAAAKEAAAKEAAAK

SEQ ID NO: 52 - protein, 20 aa, synthetic construct
  REGION 1..20: note = Synthetic
GGGGSGGGGSGGGGSGGGGS

SEQ ID NO: 53 - protein, 20 aa, synthetic construct
  REGION 1..20: note = Synthetic
GGGGSGGGGSEAAAKEAAAK

SEQ ID NO: 54 - protein, 20 aa, synthetic construct
  REGION 1..20: note = Synthetic
GGGGSEAAAKGGGGSGGGGS

SEQ ID NO: 55 - protein, 25 aa, synthetic construct
  REGION 1..25: note = Synthetic
EAAAKEAAAKEAAAKGGGGSGGGGS

SEQ ID NO: 56 - protein, 20 aa, synthetic construct
  REGION 1..20: note = Synthetic
EAAAKEAAAKEAAAKEAAAK

SEQ ID NO: 57 - protein, 25 aa, synthetic construct
  REGION 1..25: note = Synthetic
GGGGSEAAAKEAAAKGGGGSEAAAK

SEQ ID NO: 58 - protein, 25 aa, synthetic construct
  REGION 1..25: note = Synthetic
EAAAKEAAAKGGGGSGGGGSGGGGS

SEQ ID NO: 59 - protein, 25 aa, synthetic construct
  REGION 1..25: note = Synthetic
EAAAKEAAAKGGGGSGGGGSEAAAK

SEQ ID NO: 60 - DNA, 12 bp, synthetic construct
  misc_feature 1..12: note = Synthetic
  source 1..12: mol_type = other DNA
tctggtggttct

SEQ ID NO: 61 - protein, 4 aa, synthetic construct
  REGION 1..4: note = Synthetic
SGGS

SEQ ID NO: 62 - DNA, 21 bp, synthetic construct
  misc_feature 1..21: note = Synthetic
  source 1..21: mol_type = other DNA
cccaagaagaagaggaaagtc

SEQ ID NO: 63 - protein, 7 aa, synthetic construct
  REGION 1..7: note = Synthetic
PKKKRKV

SEQ ID NO: 64 - DNA, 5472 bp, synthetic construct
  misc_feature 1..5472: note = Synthetic
  source 1..5472: mol_type = other DNA
tcaatattggccattagccatattattcattggttatatagcataaatcaatattggctattggccattgcatacgttgtatctatatcataatatgtacatttatattggctcatgtccaatatgaccgccatgttggcattgattattgactagttattaatagtaatcaattacggggtcattagttcatagcccatatatggagttccgcgttacataacttacggtaaatggcccgcctggctgaccgcccaacgacccccgcccattgacgtcaataatgacgtatgttcccatagtaacgccaatagggactttccattgacgtcaatgggtggagtatttacggtaaactgcccacttggcagtacatcaagtgtatcatatgccaagtccgccccctattgacgtcaatgacggtaaatggcccgcctggcattatgcccagtacatgaccttacgggactttcctacttggcagtacatctacgtattagtcatcgctattaccatggtgatgcggttttggcagtacaccaatgggcgtggatagcggtttgactcacggggatttccaagtctccaccccattgacgtcaatgggagtttgttttggcaccaaaatcaacgggactttccaaaatgtcgtaacaactgcgatcgcccgccccgttgacgcaaatgggcggtaggcgtgtacggtgggaggtctatataagcagagctcgtttagtgaaccgtcagatcactagaagctttattgcggtagtttatcacagttaaattgctaacgcagtcagtgcttctgacacaacagtctcgaacttaagctgcagtgactctcttaaggtagccttgcagaagttggtcgtgaggcactgggcaggtaagtatcaaggttacaagacaggtttaaggagaccaatagaaactgggcttgtcgagacagagaagactcttgcgtttctgataggcacctattggtcttactgacatccactttgcctttctctccacaggtgtccactcccagttcaattacagctcttaaggctagagtacttaatacgactcactataggctagcctcgagaattcacgcgtggtacctctagagtcgacccgggcggccgcttccctttagtgagggttaatgcttcgagcagacatgataagatacattgatgagtttggacaaaccacaactagaatgcagtgaaaaaaatgctttatttgtgaaatttgtgatgctattgctttatttgtaaccattataagctgcaataaacaagttaacaacaacaattgcattcattttatgtttcaggttcagggggagatgtgggaggttttttaaagcaagtaaaacctctacaaatgtggtaaaatccgataaggatcgatccgggctggcgtaatagcgaagaggcccgcaccgatcgcccttcccaacagttgcgcagcctgaatggcgaatggacgcgccctgtagcggcgcattaagcgcggcgggtgtggtggttacgcgcagcgtgaccgctacacttgccagcgccctagcgcccgctcctttcgctttcttcccttcctttctcgccacgttcgccggctttccccgtcaagctctaaatcgggggctccctttagggttccgatttagtgctttacggcacctcgaccccaaaaaacttgattagggtgatggttcacgtagtgggccatcgccctgatagacggtttttcgccctttgacgttggagtccacgttctttaatagtggactcttgttccaaactggaacaacactcaaccctatctcggtctattcttttgatttataagggattttgccgatttcggcctattggttaaaaaatgagctgatttaacaaaaatttaacgcgaattttaacaaaatattaacgcttacaatttcctgatgcggtattttctccttacgcatctgtgcggtatttcacaccgcatacgcggatctgcgcagcaccatggcctgaaataacctctgaaagaggaacttggttaggtaccttctgaggcggaaagaaccagctgtggaatgtgtgtcagttagggtgtggaaagtccccaggctccccagcaggcagaagtatgcaaagcatgcatctcaattagtcagcaaccaggtgtggaaagtccccaggctccccagcaggcagaagtatgcaaagcatgcatctcaattagtcagcaaccatagtcccgcccctaactccgcccatcccgcccctaactccgcccagttccgcccattctccgccccatggctgactaattttttttatttatgcagaggccgaggccgcctcggcctctgagctattccagaagtagtgaggaggcttttttggaggcctaggcttttgcaaaaagcttgattcttctgacacaacagtctcgaacttaaggctagagccaccatgattgaacaagatggattgcacgcaggttctccggccgcttgggtggagaggctattcggctatgactgggcacaacagacaatcggctgctctgatgccgccgtgttccggctgtcagcgcaggggcgcccggttctttttgtcaagaccgacctgtccggtgccctgaatgaactgcaggacgaggcagcgcggctatcgtggctggccacgacgggcgttccttgcgcagctgtgctcgacgttgtcactgaagcgggaagggactggctgctattgggcgaagtgccggggcaggatctcctgtcatctcaccttgctcctgccgagaaagtatccatcatggctgatgcaatgcggcggctgcatacgcttgatccggctacctgcccattcgaccaccaagcgaaacatcgcatcgagcgagcacgtactcggatggaagccggtcttgtcgatcaggatgatctggacgaagagcatcaggggctcgcgccagccgaactgttcgccaggctcaaggcgcgcatgcccgacggcgaggatctcgtcgtgacccatggcgatgcctgcttgccgaatatcatggtggaaaatggccgcttttctggattcatcgactgtggccggctgggtgtggcggaccgctatcaggacatagcgttggctacccgtgatattgctgaagagcttggcggcgaatgggctgaccgcttcctcgtgctttacggtatcgccgctcccgattcgcagcgcatcgccttctatcgccttcttgacgagttcttctgagcgggactctggggttcgaaatgaccgaccaagcgacgcccaacctgccatcacgatggccgcaataaaatatctttattttcattacatctgtgtgttggttttttgtgtgaatcgatagcgataaggatccgcgtatggtgcactctcagtacaatctgctctgatgccgcatagttaagccagccccgacacccgccaacacccgctgacgcgccctgacgggcttgtctgctcccggcatccgcttacagacaagctgtgaccgtctccgggagctgcatgtgtcagaggttttcaccgtcatcaccgaaacgcgcgagacgaaagggcctcgtgatacgcctatttttataggttaatgtcatgataataatggtttcttagacgtcaggtggcacttttcggggaaatgtgcgcggaacccctatttgtttatttttctaaatacattcaaatatgtatccgctcatgagacaataaccctgataaatgcttcaataatattgaaaaaggaagagtatgagtattcaacatttccgtgtcgcccttattcccttttttgcggcattttgccttcctgtttttgctcacccagaaacgctggtgaaagtaaaagatgctgaagatcagttgggtgcacgagtgggttacatcgaactggatctcaacagcggtaagatccttgagagttttcgccccgaagaacgttttccaatgatgagcacttttaaagttctgctatgtggcgcggtattatcccgtattgacgccgggcaagagcaactcggtcgccgcatacactattctcagaatgacttggttgagtactcaccagtcacagaaaagcatcttacggatggcatgacagtaagagaattatgcagtgctgccataaccatgagtgataacactgcggccaacttacttctgacaacgatcggaggaccgaaggagctaaccgcttttttgcacaacatgggggatcatgtaactcgccttgatcgttgggaaccggagctgaatgaagccataccaaacgacgagcgtgacaccacgatgcctgtagcaatggcaacaacgttgcgcaaactattaactggcgaactacttactctagcttcccggcaacaattaatagactggatggaggcggataaagttgcaggaccacttctgcgctcggcccttccggctggctggtttattgctgataaatctggagccggtgagcgtgggtctcgcggtatcattgcagcactggggccagatggtaagccctcccgtatcgtagttatctacacgacggggagtcaggcaactatggatgaacgaaatagacagatcgctgagataggtgcctcactgattaagcattggtaactgtcagaccaagtttactcatatatactttagattgatttaaaacttcatttttaatttaaaaggatctaggtgaagatcctttttgataatctcatgaccaaaatcccttaacgtgagttttcgttccactgagcgtcagaccccgtagaaaagatcaaaggatcttcttgagatcctttttttctgcgcgtaatctgctgcttgcaaacaaaaaaaccaccgctaccagcggtggtttgtttgccggatcaagagctaccaactctttttccgaaggtaactggcttcagcagagcgcagataccaaatactgttcttctagtgtagccgtagttaggccaccacttcaagaactctgtagcaccgcctacatacctcgctctgctaatcctgttaccagtggctgctgccagtggcgataagtcgtgtcttaccgggttggactcaagacgatagttaccggataaggcgcagcggtcgggctgaacggggggttcgtgcacacagcccagcttggagcgaacgacctacaccgaactgagatacctacagcgtgagctatgagaaagcgccacgcttcccgaagggagaaaggcggacaggtatccggtaagcggcagggtcggaacaggagagcgcacgagggagcttccagggggaaacgcctggtatctttatagtcctgtcgggtttcgccacctctgacttgagcgtcgatttttgtgatgctcgtcaggggggcggagcctatggaaaaacgccagcaacgcggcctttttacggttcctggccttttgctggccttttgctcacatggctcgacagatct

SEQ ID NO: 65 - DNA, 4401 bp, synthetic construct
  misc_feature 1..4401: note = Synthetic
  source 1..4401: mol_type = other DNA
gataagaagtactcaatcgggctggatatcggaactaattccgtgggttgggcagtgatcacggatgaatacaaagtgccgtccaagaagttcaaggtcctggggaacaccgatagacacagcatcaagaaaaatctcatcggagccctgctgtttgactccggcgaaaccgcagaagcgacccggctcaaacgtaccgcgaggcgacgctacacccggcggaagaatcgcatctgctatctgcaagagatcttttcgaacgaaatggcaaaggtcgacgacagcttcttccaccgcctggaagaatctttcctggtggaggaggacaagaagcatgaacggcatcctatctttggaaacatcgtcgacgaagtggcgtaccacgaaaagtacccgaccatctaccatctgcggaagaagttggttgactcaactgacaaggccgacctcagattgatctacttggccctcgcccatatgatcaaattccgcggacacttcctgatcgaaggcgatctgaaccctgataactccgacgtggataagcttttcattcaactggtgcagacctacaaccaactgttcgaagaaaacccaatcaatgctagcggcgtcgatgccaaggccatcctgtccgcccggctgtcgaagtcgcggcgcctcgaaaacctgatcgcacagctgccgggagagaaaaagaacggacttttcggcaacttgatcgctctctcactgggactcactcccaatttcaagtccaattttgacctggccgaggacgcgaagctgcaactctcaaaggacacctacgacgacgacttggacaatttgctggcacaaattggcgatcagtacgcggatctgttccttgccgctaagaacctttcggacgcaatcttgctgtccgatatcctgcgcgtgaacaccgaaataaccaaagcgccgcttagcgcctcgatgattaagcggtacgacgagcatcaccaggatctcacgctgctcaaagcgctcgtgagacagcaactgcctgaaaagtacaaggagatcttcttcgaccagtccaagaatgggtacgcagggtacatcgatggaggcgctagccaggaagagttctataagttcatcaagccaatcctggaaaagatggacggaaccgaagaactgctggtcaagctgaacagggaggatctgctccggaaacagagaacctttgacaacggatccattccccaccagatccatctgggtgagctgcacgccatcttgcggcgccaggaggacttttacccattcctcaaggacaaccgggaaaagatcgagaaaattctgacgttccgcatcccgtattacgtgggcccactggcgcgcggcaattcgcgcttcgcgtggatgactagaaaatcagaggaaaccatcactccttggaatttcgaggaagttgtggataagggagcttcggcacaaagcttcatcgaacgaatgaccaacttcgacaagaatctcccaaacgagaaggtgcttcctaagcacagcctcctttacgaatacttcactgtctacaacgaactgactaaagtgaaatacgttactgaaggaatgaggaagccggcctttctgtccggagaacagaagaaagcaattgtcgatctgctgttcaagaccaaccgcaaggtgaccgtcaagcagcttaaagaggactacttcaagaagatcgagtgtttcgactcagtggaaatcagcggggtggaggacagattcaacgcttcgctgggaacctatcatgatctcctgaagatcatcaaggacaaggacttccttgacaacgaggagaacgaggacatcctggaagatatcgtcctgaccttgacccttttcgaggatcgcgagatgatcgaggagaggcttaagacctacgctcatctcttcgacgataaggtcatgaaacaactcaagcgccgccggtacactggttggggccgcctctcccgcaagctgatcaacggtattcgcgataaacagagcggtaaaactatcctggatttcctcaaatcggatggcttcgctaatcgtaacttcatgcaattgatccacgacgacagcctgacctttaaggaggacatccaaaaagcacaagtgtccggacagggagactcactccatgaacacatcgcgaatctggccggttcgccggcgattaagaagggaattctgcaaactgtgaaggtggtcgacgagctggtgaaggtcatgggacggcacaaaccggagaatatcgtgattgaaatggcccgagaaaaccagactacccagaagggccagaaaaactcccgcgaaaggatgaagcggatcgaagaaggaatcaaggagctgggcagccagatcctgaaagagcacccggtggaaaacacgcagctgcagaacgagaagctctacctgtactatttgcaaaatggacgggacatgtacgtggaccaagagctggacatcaatcggttgtctgattacgacgtggaccacatcgttccacagtcctttctgaaggatgactcgatcgataacaaggtgttgactcgcagcgacaagaacagagggaagtcagataatgtgccatcggaggaggtcgtgaagaagatgaagaattactggcggcagctcctgaatgcgaagctgattacccagagaaagtttgacaatctcactaaagccgagcgcggcggactctcagagctggataaggctggattcatcaaacggcagctggtcgagactcggcagattaccaagcacgtggcgcagatcttggactcccgcatgaacactaaatacgacgagaacgataagctcatccgggaagtgaaggtgattaccctgaaaagcaaacttgtgtcggactttcggaaggactttcagttttacaaagtgagagaaatcaacaactaccatcacgcgcatgacgcatacctcaacgctgtggtcggtaccgccctgatcaaaaagtaccctaaacttgaatcggagtttgtgtacggagactacaaggtctacgacgtgaggaagatgatagccaagtccgaacaggaaatcgggaaagcaactgcgaaatacttcttttactcaaacatcatgaactttttcaagactgaaattacgctggccaatggagaaatcaggaagaggccactgatcgaaactaacggagaaacgggcgaaatcgtgtgggacaagggcagggacttcgcaactgttcgcaaagtgctctctatgccgcaagtcaatattgtgaagaaaaccgaagtgcaaaccggcggattttcaaaggaatcgatcctcccaaagagaaatagcgacaagctcattgcacgcaagaaagactgggacccgaagaagtacggaggattcgattcgccgactgtcgcatactccgtcctcgtggtggccaaggtggagaagggaaagagcaaaaagctcaaatccgtcaaagagctgctggggattaccatcatggaacgatcctcgttcgagaagaacccgattgatttcctcgaggcgaagggttacaaggaggtgaagaaggatctgatcatcaaactccccaagtactcactgttcgaactggaaaatggtcggaagcgcatgctggcttcggccggagaactccaaaaaggaaatgagctggccttgcctagcaagtacgtcaacttcctctatcttgcttcgcactacgaaaaactcaaagggtcaccggaagataacgaacagaagcagcttttcgtggagcagcacaagcattatctggatgaaatcatcgaacaaatctccgagttttcaaagcgcgtgatcctcgccgacgccaacctcgacaaagtcctgtcggcctacaataagcatagagataagccgatcagagaacaggccgagaacattatccacttgttcaccctgactaacctgggagccccagccgccttcaagtacttcgatactactatcgatcgcaaaagatacacgtccaccaaggaagttctggacgcgaccctgatccaccaaagcatcactggactctacgaaactaggatcgatctgtcgcagctgggtggcgattctggtggttctactaatctgtcagatattattgaaaaggagaccggtaagcaactggttatccaggaatccatcctcatgctcccagaggaggtggaagaagtcattgggaacaagccggaaagcgatatactcgtgcacaccgcctacgacgagagcaccgacgagaatgtcatgcttctgactagcgacgcccctgaatacaagccttgggctctggtcatacaggatagcaacggtgagaacaagattaagatgctctctggtggttctcccaagaagaagaggaaagtctaatag

SEQ ID NO: 66 - DNA, 2686 bp, synthetic construct
  misc_feature 1..2686: note = Synthetic
  source 1..2686: mol_type = other DNA
gcctgactccccgtcgtgtagataactacgatacgggagggcttaccatctggccccagtgctgcaatgataccgcgagacccacgctcaccggctccagatttatcagcaataaaccagccagccggaagggccgagcgcagaagtggtcctgcaactttatccgcctccatccagtctattaattgttgccgggaagctagagtaagtagttcgccagttaatagtttgcgcaacgttgttgccattgctacaggcatcgtggtgtcacgctcgtcgtttggtatggcttcattcagctccggttcccaacgatcaaggcgagttacatgatcccccatgttgtgcaaaaaagcggttagctccttcggtcctccgatcgttgtcagaagtaagttggccgcagtgttatcactcatggttatggcagcactgcataattctcttactgtcatgccatccgtaagatgcttttctgtgactggtgagtactcaaccaagtcattctgagaatagtgtatgcggcgaccgagttgctcttgcccggcgtcaatacgggataataccgcgccacatagcagaactttaaaagtgctcatcattggaaaacgttcttcggggcgaaaactctcaaggatcttaccgctgttgagatccagttcgatgtaacccactcgtgcacccaactgatcttcagcatcttttactttcaccagcgtttctgggtgagcaaaaacaggaaggcaaaatgccgcaaaaaagggaataagggcgacacggaaatgttgaatactcatactcttcctttttcaatattattgaagcatttatcagggttattgtctcatgagcggatacatatttgaatgtatttagaaaaataaacaaataggggttccgcgcacatttccccgaaaagtgccacctgacgtctaagaaaccattattatcatgacattaacctataaaaataggcgtatcacgaggccctttcgtctcgcgcgtttcggtgatgacggtgaaaacctctgacacatgcagctcccggagacggtcacagcttgtctgtaagcggatgccgggagcagacaagcccgtcagggcgcgtcagcgggtgttggcgggtgtcggggctggcttaactatgcggcatcagagcagattgtactgagagtgcaccatatgcggtgtgaaataccgcacagatgcgtaaggagaaaataccgcatcaggcgccattcgccattcaggctgcgcaactgttgggaagggcgatcggtgcgggcctcttcgctattacgccagctggcgaaagggggatgtgctgcaaggcgattaagttgggtaacgccagggttttcccagtcacgacgttgtaaaacgacggccagtgaattcgagctcggtacccggggatcctctagagtcgacctgcaggcatgcaagcttggcgtaatcatggtcatagctgtttcctgtgtgaaattgttatccgctcacaattccacacaacatacgagccggaagcataaagtgtaaagcctggggtgcctaatgagtgagctaactcacattaattgcgttgcgctcactgcccgctttccagtcgggaaacctgtcgtgccagctgcattaatgaatcggccaacgcgcggggagaggcggtttgcgtattgggcgctcttccgcttcctcgctcactgactcgctgcgctcggtcgttcggctgcggcgagcggtatcagctcactcaaaggcggtaatacggttatccacagaatcaggggataacgcaggaaagaacatgtgagcaaaaggccagcaaaaggccaggaaccgtaaaaaggccgcgttgctggcgtttttccataggctccgcccccctgacgagcatcacaaaaatcgacgctcaagtcagaggtggcgaaacccgacaggactataaagataccaggcgtttccccctggaagctccctcgtgcgctctcctgttccgaccctgccgcttaccggatacctgtccgcctttctcccttcgggaagcgtggcgctttctcatagctcacgctgtaggtatctcagttcggtgtaggtcgttcgctccaagctgggctgtgtgcacgaaccccccgttcagcccgaccgctgcgccttatccggtaactatcgtcttgagtccaacccggtaagacacgacttatcgccactggcagcagccactggtaacaggattagcagagcgaggtatgtaggcggtgctacagagttcttgaagtggtggcctaactacggctacactagaaggacagtatttggtatctgcgctctgctgaagccagttaccttcggaaaaagagttggtagctcttgatccggcaaacaaaccaccgctggtagcggtggtttttttgtttgcaagcagcagattacgcgcagaaaaaaaggatctcaagaagatcctttgatcttttctacggggtctgacgctcagtggaacgaaaactcacgttaagggattttggtcatgagattatcaaaaaggatcttcacctagatccttttaaattaaaaatgaagttttaaatcaatctaaagtatatatgagtaaacttggtctgacagttaccaatgcttaatcagtgaggcacctatctcagcgatctgtctatttcgttcatccatagtt

SEQ ID NO: 67 - DNA, 233 bp, synthetic construct
  misc_feature 1..233: note = Synthetic
  source 1..233: mol_type = other DNA
tttcccatgattccttcatatttgcatatacgatacaaggctgttagagagataattggaattaatttgactgtaaacacaaagatattagtacaaaatacgtgacgtagaaagtaataatttcttgggtagtttgcagttttaaaattatgttttaaaatggactatcatatgcttaccgtaacttgaaagtatttcgatttcttggctttatatatcttgtggaaaggacg

SEQ ID NO: 68 - DNA, 588 bp, synthetic construct
  misc_feature 1..588: note = Synthetic
  source 1..588: mol_type = other DNA
atagtaatcaattacggggtcattagttcatagcccatatatggagttccgcgttacataacttacggtaaatggcccgcctggctgaccgcccaacgacccccgcccattgacgtcaataatgacgtatgttcccatagtaacgccaatagggactttccattgacgtcaatgggtggagtatttacggtaaactgcccacttggcagtacatcaagtgtatcatatgccaagtccgccccctattgacgtcaatgacggtaaatggcccgcctggcattatgcccagtacatgaccttacgggactttcctacttggcagtacatctacgtattagtcatcgctattaccatggtgatgcggttttggcagtacaccaatgggcgtggatagcggtttgactcacggggatttccaagtctccaccccattgacgtcaatgggagtttgttttggcaccaaaatcaacgggactttccaaaatgtcgtaacaactgcgatcgcccgccccgttgacgcaaatgggcggtaggcgtgtacggtgggaggtctatataagcagagctcgtttagtgaaccgtcagatc

SEQ ID NO: 69 - RNA, 183 nt, synthetic construct
  misc_feature 1..183: note = Synthetic
  source 1..183: mol_type = other RNA
catcacatttaaaagcatctcagcctaccatgagaataagagaaagaaaatgaagatcaatagcttattcatctctttttctttttcgttggtgtaaagccaacaccctgtctaaaaaacataaatttctttaatcattttgcctcttttctctgtgcttcaattaataaaaaatggaaagaa

SEQ ID NO: 70 - protein, 1379 aa, synthetic construct
  REGION 1..1379: note = Synthetic
MDKKYSIGLAIGTNSVGWAVITDEYKVPSKKFKVLGNTDRHSIKKNLIGALLFDSGETAEATRLKRTARRRYTRRKNRICYLQEIFSNEMAKVDDSFFHRLEESFLVEEDKKHERHPIFGNIVDEVAYHEKYPTIYHLRKKLVDSTDKADLRLIYLALAHMIKFRGHFLIEGDLNPDNSDVDKLFIQLVQTYNQLFEENPINASGVDAKAILSARLSKSRRLENLIAQLPGEKKNGLFGNLIALSLGLTPNFKSNFDLAEDAKLQLSKDTYDDDLDNLLAQIGDQYADLFLAAKNLSDAILLSDILRVNTEITKAPLSASMIKRYDEHHQDLTLLKALVRQQLPEKYKEIFFDQSKNGYAGYIDGGASQEEFYKFIKPILEKMDGTEELLVKLNREDLLRKQRTFDNGSIPHQIHLGELHAILRRQEDFYPFLKDNREKIEKILTFRIPYYVGPLARGNSRFAWMTRKSEETITPWNFEEVVDKGASAQSFIERMTNFDKNLPNEKVLPKHSLLYEYFTVYNELTKVKYVTEGMRKPAFLSGEQKKAIVDLLFKTNRKVTVKQLKEDYFKKIECFDSVEISGVEDRFNASLGTYHDLLKIIKDKDFLDNEENEDILEDIVLTLTLFEDREMIEERLKTYAHLFDDKVMKQLKRRRYTGWGRLSRKLINGIRDKQSGKTILDFLKSDGFANRNFMQLIHDDSLTFKEDIQKAQVSGQGDSLHEHIANLAGSPAIKKGILQTVKVVDELVKVMGRHKPENIVIEMARENQTTQKGQKNSRERMKRIEEGIKELGSQILKEHPVENTQLQNEKLYLYYLQNGRDMYVDQELDINRLSDYDVDHIVPQSFLKDDSIDNKVLTRSDKNRGKSDNVPSEEVVKKMKNYWRQLLNAKLITQRKFDNLTKAERGGLSELDKAGFIKRQLVETRQITKHVAQILDSRMNTKYDENDKLIREVKVITLKSKLVSDFRKDFQFYKVREINNYHHAHDAYLNAVVGTALIKKYPKLESEFVYGDYKVYDVRKMIAKSEQEIGKATAKYFFYSNIMNFFKTEITLANGEIRKRPLIETNGETGEIVWDKGRDFATVRKVLSMPQVNIVKKTEVQTGGFSKESILPKRNSDKLIARKKDWDPKKYGGFDSPTVAYSVLVVAKVEKGKSKKLKSVKELLGITIMERSSFEKNPIDFLEAKGYKEVKKDLIIKLPKYSLFELENGRKRMLASAGELQKGNELALPSKYVNFLYLASHYEKLKGSPEDNEQKQLFVEQHKHYLDEIIEQISEFSKRVILADANLDKVLSAYNKHRDKPIREQAENIIHLFTLTNLGAPAAFKYFDTTIDRKRYTSTKEVLDATLIHQSITGLYETRIDLSQLGGDGGGSPKKKRKV

SEQ ID NO: 71 - RNA, 4140 nt, synthetic construct
  misc_feature 1..4140: note = Synthetic
  source 1..4140: mol_type = other RNA
atggacaagaagtacagcatcggactggcaatcggaacaaacagcgtcggatgggcagtcatcacagacgaatacaaggtcccgagcaagaagttcaaggtcctgggaaacacagacagacacagcatcaagaagaacctgatcggagcactgctgttcgacagcggagaaacagcagaagcaacaagactgaagagaacagcaagaagaagatacacaagaagaaagaacagaatctgctacctgcaggaaatcttcagcaacgaaatggcaaaggtcgacgacagcttcttccacagactggaagaaagcttcctggtcgaagaagacaagaagcacgaaagacacccgatcttcggaaacatcgtcgacgaagtcgcataccacgaaaagtacccgacaatctaccacctgagaaagaagctggtcgacagcacagacaaggcagacctgagactgatctacctggcactggcacacatgatcaagttcagaggacacttcctgatcgaaggagacctgaacccggacaacagcgacgtcgacaagctgttcatccagctggtccagacatacaaccagctgttcgaagaaaacccgatcaacgcaagcggagtcgacgcaaaggcaatcctgagcgcaagactgagcaagagcagaagactggaaaacctgatcgcacagctgccgggagaaaagaagaacggactgttcggaaacctgatcgcactgagcctgggactgacaccgaacttcaagagcaacttcgacctggcagaagacgcaaagctgcagctgagcaaggacacatacgacgacgacctggacaacctgctggcacagatcggagaccagtacgcagacctgttcctggcagcaaagaacctgagcgacgcaatcctgctgagcgacatcctgagagtcaacacagaaatcacaaaggcaccgctgagcgcaagcatgatcaagagatacgacgaacaccaccaggacctgacactgctgaaggcactggtcagacagcagctgccggaaaagtacaaggaaatcttcttcgaccagagcaagaacggatacgcaggatacatcgacggaggagcaagccaggaagaattctacaagttcatcaagccgatcctggaaaagatggacggaacagaagaactgctggtcaagctgaacagagaagacctgctgagaaagcagagaacattcgacaacggaagcatcccgcaccagatccacctgggagaactgcacgcaatcctgagaagacaggaagacttctacccgttcctgaaggacaacagagaaaagatcgaaaagatcctgacattcagaatcccgtactacgtcggaccgctggcaagaggaaacagcagattcgcatggatgacaagaaagagcgaagaaacaatcacaccgtggaacttcgaagaagtcgtcgacaagggagcaagcgcacagagcttcatcgaaagaatgacaaacttcgacaagaacctgccgaacgaaaaggtcctgccgaagcacagcctgctgtacgaatacttcacagtctacaacgaactgacaaaggtcaagtacgtcacagaaggaatgagaaagccggcattcctgagcggagaacagaagaaggcaatcgtcgacctgctgttcaagacaaacagaaaggtcacagtcaagcagctgaaggaagactacttcaagaagatcgaatgcttcgacagcgtcgaaatcagcggagtcgaagacagattcaacgcaagcctgggaacataccacgacctgctgaagatcatcaaggacaaggacttcctggacaacgaagaaaacgaagacatcctggaagacatcgtcctgacactgacactgttcgaagacagagaaatgatcgaagaaagactgaagacatacgcacacctgttcgacgacaaggtcatgaagcagctgaagagaagaagatacacaggatggggaagactgagcagaaagctgatcaacggaatcagagacaagcagagcggaaagacaatcctggacttcctgaagagcgacggattcgcaaacagaaacttcatgcagctgatccacgacgacagcctgacattcaaggaagacatccagaaggcacaggtcagcggacagggagacagcctgcacgaacacatcgcaaacctggcaggaagcccggcaatcaagaagggaatcctgcagacagtcaaggtcgtcgacgaactggtcaaggtcatgggaagacacaagccggaaaacatcgtcatcgaaatggcaagagaaaaccagacaacacagaagggacagaagaacagcagagaaagaatgaagagaatcgaagaaggaatcaaggaactgggaagccagatcctgaaggaacacccggtcgaaaacacacagctgcagaacgaaaagctgtacctgtactacctgcagaacggaagagacatgtacgtcgaccaggaactggacatcaacagactgagcgactacgacgtcgaccacatcgtcccgcagagcttcctgaaggacgacagcatcgacaacaaggtcctgacaagaagcgacaagaacagaggaaagagcgacaacgtcccgagcgaagaagtcgtcaagaagatgaagaactactggagacagctgctgaacgcaaagctgatcacacagagaaagttcgacaacctgacaaaggcagagagaggaggactgagcgaactggacaaggcaggattcatcaagagacagctggtcgaaacaagacagatcacaaagcacgtcgcacagatcctggacagcagaatgaacacaaagtacgacgaaaacgacaagctgatcagagaagtcaaggtcatcacactgaagagcaagctggtcagcgacttcagaaaggacttccagttctacaaggtcagagaaatcaacaactaccaccacgcacacgacgcatacctgaacgcagtcgtcggaacagcactgatcaagaagtacccgaagctggaaagcgaattcgtctacggagactacaaggtctacgacgtcagaaagatgatcgcaaagagcgaacaggaaatcggaaaggcaacagcaaagtacttcttctacagcaacatcatgaacttcttcaagacagaaatcacactggcaaacggagaaatcagaaagagaccgctgatcgaaacaaacggagaaacaggagaaatcgtctgggacaagggaagagacttcgcaacagtcagaaaggtcctgagcatgccgcaggtcaacatcgtcaagaagacagaagtccagacaggaggattcagcaaggaaagcatcctgccgaagagaaacagcgacaagctgatcgcaagaaagaaggactgggacccgaagaagtacggaggattcgacagcccgacagtcgcatacagcgtcctggtcgtcgcaaaggtcgaaaagggaaagagcaagaagctgaagagcgtcaaggaactgctgggaatcacaatcatggaaagaagcagcttcgaaaagaacccgatcgacttcctggaagcaaagggatacaaggaagtcaagaaggacctgatcatcaagctgccgaagtacagcctgttcgaactggaaaacggaagaaagagaatgctggcaagcgcaggagaactgcagaagggaaacgaactggcactgccgagcaagtacgtcaacttcctgtacctggcaagccactacgaaaagctgaagggaagcccggaagacaacgaacagaagcagctgttcgtcgaacagcacaagcactacctggacgaaatcatcgaacagatcagcgaattcagcaagagagtcatcctggcagacgcaaacctggacaaggtcctgagcgcatacaacaagcacagagacaagccgatcagagaacaggcagaaaacatcatccacctgttcacactgacaaacctgggagcaccggcagcattcaagtacttcgacacaacaatcgacagaaagagatacacaagcacaaaggaagtcctggacgcaacactgatccaccagagcatcacaggactgtacgaaacaagaatcgacctgagccagctgggaggagacggaggaggaagcccgaagaagaagagaaaggtctag

SEQ ID NO: 72 - RNA, 4134 nt, synthetic construct
  misc_feature 1..4134: note = Synthetic
  source 1..4134: mol_type = other RNA
gacaagaagtacagcatcggactggcaatcggaacaaacagcgtcggatgggcagtcatcacagacgaatacaaggtcccgagcaagaagttcaaggtcctgggaaacacagacagacacagcatcaagaagaacctgatcggagcactgctgttcgacagcggagaaacagcagaagcaacaagactgaagagaacagcaagaagaagatacacaagaagaaagaacagaatctgctacctgcaggaaatcttcagcaacgaaatggcaaaggtcgacgacagcttcttccacagactggaagaaagcttcctggtcgaagaagacaagaagcacgaaagacacccgatcttcggaaacatcgtcgacgaagtcgcataccacgaaaagtacccgacaatctaccacctgagaaagaagctggtcgacagcacagacaaggcagacctgagactgatctacctggcactggcacacatgatcaagttcagaggacacttcctgatcgaaggagacctgaacccggacaacagcgacgtcgacaagctgttcatccagctggtccagacatacaaccagctgttcgaagaaaacccgatcaacgcaagcggagtcgacgcaaaggcaatcctgagcgcaagactgagcaagagcagaagactggaaaacctgatcgcacagctgccgggagaaaagaagaacggactgttcggaaacctgatcgcactgagcctgggactgacaccgaacttcaagagcaacttcgacctggcagaagacgcaaagctgcagctgagcaaggacacatacgacgacgacctggacaacctgctggcacagatcggagaccagtacgcagacctgttcctggcagcaaagaacctgagcgacgcaatcctgctgagcgacatcctgagagtcaacacagaaatcacaaaggcaccgctgagcgcaagcatgatcaagagatacgacgaacaccaccaggacctgacactgctgaaggcactggtcagacagcagctgccggaaaagtacaaggaaatcttcttcgaccagagcaagaacggatacgcaggatacatcgacggaggagcaagccaggaagaattctacaagttcatcaagccgatcctggaaaagatggacggaacagaagaactgctggtcaagctgaacagagaagacctgctgagaaagcagagaacattcgacaacggaagcatcccgcaccagatccacctgggagaactgcacgcaatcctgagaagacaggaagacttctacccgttcctgaaggacaacagagaaaagatcgaaaagatcctgacattcagaatcccgtactacgtcggaccgctggcaagaggaaacagcagattcgcatggatgacaagaaagagcgaagaaacaatcacaccgtggaacttcgaagaagtcgtcgacaagggagcaagcgcacagagcttcatcgaaagaatgacaaacttcgacaagaacctgccgaacgaaaaggtcctgccgaagcacagcctgctgtacgaatacttcacagtctacaacgaactgacaaaggtcaagtacgtcacagaaggaatgagaaagccggcattcctgagcggagaacagaagaaggcaatcgtcgacctgctgttcaagacaaacagaaaggtcacagtcaagcagctgaaggaagactacttcaagaagatcgaatgcttcgacagcgtcgaaatcagcggagtcgaagacagattcaacgcaagcctgggaacataccacgacctgctgaagatcatcaaggacaaggacttcctggacaacgaagaaaacgaagacatcctggaagacatcgtcctgacactgacactgttcgaagacagagaaatgatcgaagaaagactgaagacatacgcacacctgttcgacgacaaggtcatgaagcagctgaagagaagaagatacacaggatggggaagactgagcagaaagctgatcaacggaatcagagacaagcagagcggaaagacaatcctggacttcctgaagagcgacggattcgcaaacagaaacttcatgcagctgatccacgacgacagcctgacattcaaggaagacatccagaaggcacaggtcagcggacagggagacagcctgcacgaacacatcgcaaacctggcaggaagcccggcaatcaagaagggaatcctgcagacagtcaaggtcgtcgacgaactggtcaaggtcatgggaagacacaagccggaaaacatcgtcatcgaaatggcaagagaaaaccagacaacacagaagggacagaagaacagcagagaaagaatgaagagaatcgaagaaggaatcaaggaactgggaagccagatcctgaaggaacacccggtcgaaaacacacagctgcagaacgaaaagctgtacctgtactacctgcagaacggaagagacatgtacgtcgaccaggaactggacatcaacagactgagcgactacgacgtcgaccacatcgtcccgcagagcttcctgaaggacgacagcatcgacaacaaggtcctgacaagaagcgacaagaacagaggaaagagcgacaacgtcccgagcgaagaagtcgtcaagaagatgaagaactactggagacagctgctgaacgcaaagctgatcacacagagaaagttcgacaacctgacaaaggcagagagaggaggactgagcgaactggacaaggcaggattcatcaagagacagctggtcgaaacaagacagatcacaaagcacgtcgcacagatcctggacagcagaatgaacacaaagtacgacgaaaacgacaagctgatcagagaagtcaaggtcatcacactgaagagcaagctggtcagcgacttcagaaaggacttccagttctacaaggtcagagaaatcaacaactaccaccacgcacacgacgcatacctgaacgcagtcgtcggaacagcactgatcaagaagtacccgaagctggaaagcgaattcgtctacggagactacaaggtctacgacgtcagaaagatgatcgcaaagagcgaacaggaaatcggaaaggcaacagcaaagtacttcttctacagcaacatcatgaacttcttcaagacagaaatcacactggcaaacggagaaatcagaaagagaccgctgatcgaaacaaacggagaaacaggagaaatcgtctgggacaagggaagagacttcgcaacagtcagaaaggtcctgagcatgccgcaggtcaacatcgtcaagaagacagaagtccagacaggaggattcagcaaggaaagcatcctgccgaagagaaacagcgacaagctgatcgcaagaaagaaggactgggacccgaagaagtacggaggattcgacagcccgacagtcgcatacagcgtcctggtcgtcgcaaaggtcgaaaagggaaagagcaagaagctgaagagcgtcaaggaactgctgggaatcacaatcatggaaagaagcagcttcgaaaagaacccgatcgacttcctggaagcaaagggatacaaggaagtcaagaaggacctgatcatcaagctgccgaagtacagcctgttcgaactggaaaacggaagaaagagaatgctggcaagcgcaggagaactgcagaagggaaacgaactggcactgccgagcaagtacgtcaacttcctgtacctggcaagccactacgaaaagctgaagggaagcccggaagacaacgaacagaagcagctgttcgtcgaacagcacaagcactacctggacgaaatcatcgaacagatcagcgaattcagcaagagagtcatcctggcagacgcaaacctggacaaggtcctgagcgcatacaacaagcacagagacaagccgatcagagaacaggcagaaaacatcatccacctgttcacactgacaaacctgggagcaccggcagcattcaagtacttcgacacaacaatcgacagaaagagatacacaagcacaaaggaagtcctggacgcaacactgatccaccagagcatcacaggactgtacgaaacaagaatcgacctgagccagctgggaggagacggaggaggaagcccgaagaagaagagaaaggtc

SEQ ID NO: 73 - protein, 1368 aa, synthetic construct
  REGION 1..1368: note = Synthetic
MDKKYSIGLAIGTNSVGWAVITDEYKVPSKKFKVLGNTDRHSIKKNLIGALLFDSGETAEATRLKRTARRRYTRRKNRICYLQEIFSNEMAKVDDSFFHRLEESFLVEEDKKHERHPIFGNIVDEVAYHEKYPTIYHLRKKLVDSTDKADLRLIYLALAHMIKFRGHFLIEGDLNPDNSDVDKLFIQLVQTYNQLFEENPINASGVDAKAILSARLSKSRRLENLIAQLPGEKKNGLFGNLIALSLGLTPNFKSNFDLAEDAKLQLSKDTYDDDLDNLLAQIGDQYADLFLAAKNLSDAILLSDILRVNTEITKAPLSASMIKRYDEHHQDLTLLKALVRQQLPEKYKEIFFDQSKNGYAGYIDGGASQEEFYKFIKPILEKMDGTEELLVKLNREDLLRKQRTFDNGSIPHQIHLGELHAILRRQEDFYPFLKDNREKIEKILTFRIPYYVGPLARGNSRFAWMTRKSEETITPWNFEEVVDKGASAQSFIERMTNFDKNLPNEKVLPKHSLLYEYFTVYNELTKVKYVTEGMRKPAFLSGEQKKAIVDLLFKTNRKVTVKQLKEDYFKKIECFDSVEISGVEDRFNASLGTYHDLLKIIKDKDFLDNEENEDILEDIVLTLTLFEDREMIEERLKTYAHLFDDKVMKQLKRRRYTGWGRLSRKLINGIRDKQSGKTILDFLKSDGFANRNFMQLIHDDSLTFKEDIQKAQVSGQGDSLHEHIANLAGSPAIKKGILQTVKVVDELVKVMGRHKPENIVIEMARENQTTQKGQKNSRERMKRIEEGIKELGSQILKEHPVENTQLQNEKLYLYYLQNGRDMYVDQELDINRLSDYDVDHIVPQSFLKDDSIDNKVLTRSDKNRGKSDNVPSEEVVKKMKNYWRQLLNAKLITQRKFDNLTKAERGGLSELDKAGFIKRQLVETRQITKHVAQILDSRMNTKYDENDKLIREVKVITLKSKLVSDFRKDFQFYKVREINNYHHAHDAYLNAVVGTALIKKYPKLESEFVYGDYKVYDVRKMIAKSEQEIGKATAKYFFYSNIMNFFKTEITLANGEIRKRPLIETNGETGEIVWDKGRDFATVRKVLSMPQVNIVKKTEVQTGGFSKESILPKRNSDKLIARKKDWDPKKYGGFDSPTVAYSVLVVAKVEKGKSKKLKSVKELLGITIMERSSFEKNPIDFLEAKGYKEVKKDLIIKLPKYSLFELENGRKRMLASAGELQKGNELALPSKYVNFLYLASHYEKLKGSPEDNEQKQLFVEQHKHYLDEIIEQISEFSKRVILADANLDKVLSAYNKHRDKPIREQAENIIHLFTLTNLGAPAAFKYFDTTIDRKRYTSTKEVLDATLIHQSITGLYETRIDLSQLGGD

SEQ ID NO: 74 - RNA, 4107 nt, synthetic construct
  misc_feature 1..4107: note = Synthetic
  source 1..4107: mol_type = other RNA
atggacaagaagtacagcatcggactggcaatcggaacaaacagcgtcggatgggcagtcatcacagacgaatacaaggtcccgagcaagaagttcaaggtcctgggaaacacagacagacacagcatcaagaagaacctgatcggagcactgctgttcgacagcggagaaacagcagaagcaacaagactgaagagaacagcaagaagaagatacacaagaagaaagaacagaatctgctacctgcaggaaatcttcagcaacgaaatggcaaaggtcgacgacagcttcttccacagactggaagaaagcttcctggtcgaagaagacaagaagcacgaaagacacccgatcttcggaaacatcgtcgacgaagtcgcataccacgaaaagtacccgacaatctaccacctgagaaagaagctggtcgacagcacagacaaggcagacctgagactgatctacctggcactggcacacatgatcaagttcagaggacacttcctgatcgaaggagacctgaacccggacaacagcgacgtcgacaagctgttcatccagctggtccagacatacaaccagctgttcgaagaaaacccgatcaacgcaagcggagtcgacgcaaaggcaatcctgagcgcaagactgagcaagagcagaagactggaaaacctgatcgcacagctgccgggagaaaagaagaacggactgttcggaaacctgatcgcactgagcctgggactgacaccgaacttcaagagcaacttcgacctggcagaagacgcaaagctgcagctgagcaaggacacatacgacgacgacctggacaacctgctggcacagatcggagaccagtacgcagacctgttcctggcagcaaagaacctgagcgacgcaatcctgctgagcgacatcctgagagtcaacacagaaatcacaaaggcaccgctgagcgcaagcatgatcaagagatacgacgaacaccaccaggacctgacactgctgaaggcactggtcagacagcagctgccggaaaagtacaaggaaatcttcttcgaccagagcaagaacggatacgcaggatacatcgacggaggagcaagccaggaagaattctacaagttcatcaagccgatcctggaaaagatggacggaacagaagaactgctggtcaagctgaacagagaagacctgctgagaaagcagagaacattcgacaacggaagcatcccgcaccagatccacctgggagaactgcacgcaatcctgagaagacaggaagacttctacccgttcctgaaggacaacagagaaaagatcgaaaagatcctgacattcagaatcccgtactacgtcggaccgctggcaagaggaaacagcagattcgcatggatgacaagaaagagcgaagaaacaatcacaccgtggaacttcgaagaagtcgtcgacaagggagcaagcgcacagagcttcatcgaaagaatgacaaacttcgacaagaacctgccgaacgaaaaggtcctgccgaagcacagcctgctgtacgaatacttcacagtctacaacgaactgacaaaggtcaagtacgtcacagaaggaatgagaaagccggcattcctgagcggagaacagaagaaggcaatcgtcgacctgctgttcaagacaaacagaaaggtcacagtcaagcagctgaaggaagactacttcaagaagatcgaatgcttcgacagcgtcgaaatcagcggagtcgaagacagattcaacgcaagcctgggaacataccacgacctgctgaagatcatcaaggacaaggacttcctggacaacgaagaaaacgaagacatcctggaagacatcgtcctgacactgacactgttcgaagacagagaaatgatcgaagaaagactgaagacatacgcacacctgttcgacgacaaggtcatgaagcagctgaagagaagaagatacacaggatggggaagactgagcagaaagctgatcaacggaatcagagacaagcagagcggaaagacaatcctggacttcctgaagagcgacggattcgcaaacagaaacttcatgcagctgatccacgacgacagcctgacattcaaggaagacatccagaaggcacaggtcagcggacagggagacagcctgcacgaacacatcgcaaacctggcaggaagcccggcaatcaagaagggaatcctgcagacagtcaaggtcgtcgacgaactggtcaaggtcatgggaagacacaagccggaaaacatcgtcatcgaaatggcaagagaaaaccagacaacacagaagggacagaagaacagcagagaaagaatgaagagaatcgaagaaggaatcaaggaactgggaagccagatcctgaaggaacacccggtcgaaaacacacagctgcagaacgaaaagctgtacctgtactacctgcagaacggaagagacatgtacgtcgaccaggaactggacatcaacagactgagcgactacgacgtcgaccacatcgtcccgcagagcttcctgaaggacgacagcatcgacaacaaggtcctgacaagaagcgacaagaacagaggaaagagcgacaacgtcccgagcgaagaagtcgtcaagaagatgaagaactactggagacagctgctgaacgcaaagctgatcacacagagaaagttcgacaacctgacaaaggcagagagaggaggactgagcgaactggacaaggcaggattcatcaagagacagctggtcgaaacaagacagatcacaaagcacgtcgcacagatcctggacagcagaatgaacacaaagtacgacgaaaacgacaagctgatcagagaagtcaaggtcatcacactgaagagcaagctggtcagcgacttcagaaaggacttccagttctacaaggtcagagaaatcaacaactaccaccacgcacacgacgcatacctgaacgcagtcgtcggaacagcactgatcaagaagtacccgaagctggaaagcgaattcgtctacggagactacaaggtctacgacgtcagaaagatgatcgcaaagagcgaacaggaaatcggaaaggcaacagcaaagtacttcttctacagcaacatcatgaacttcttcaagacagaaatcacactggcaaacggagaaatcagaaagagaccgctgatcgaaacaaacggagaaacaggagaaatcgtctgggacaagggaagagacttcgcaacagtcagaaaggtcctgagcatgccgcaggtcaacatcgtcaagaagacagaagtccagacaggaggattcagcaaggaaagcatcctgccgaagagaaacagcgacaagctgatcgcaagaaagaaggactgggacccgaagaagtacggaggattcgacagcccgacagtcgcatacagcgtcctggtcgtcgcaaaggtcgaaaagggaaagagcaagaagctgaagagcgtcaaggaactgctgggaatcacaatcatggaaagaagcagcttcgaaaagaacccgatcgacttcctggaagcaaagggatacaaggaagtcaagaaggacctgatcatcaagctgccgaagtacagcctgttcgaactggaaaacggaagaaagagaatgctggcaagcgcaggagaactgcagaagggaaacgaactggcactgccgagcaagtacgtcaacttcctgtacctggcaagccactacgaaaagctgaagggaagcccggaagacaacgaacagaagcagctgttcgtcgaacagcacaagcactacctggacgaaatcatcgaacagatcagcgaattcagcaagagagtcatcctggcagacgcaaacctggacaaggtcctgagcgcatacaacaagcacagagacaagccgatcagagaacaggcagaaaacatcatccacctgttcacactgacaaacctgggagcaccggcagcattcaagtacttcgacacaacaatcgacagaaagagatacacaagcacaaaggaagtcctggacgcaacactgatccaccagagcatcacaggactgtacgaaacaagaatcgacctgagccagctgggaggagactag

SEQ ID NO: 75 - RNA, 4101 nt, synthetic construct
  misc_feature 1..4101: note = Synthetic
  source 1..4101: mol_type = other RNA
gacaagaagtacagcatcggactggcaatcggaacaaacagcgtcggatgggcagtcatcacagacgaatacaaggtcccgagcaagaagttcaaggtcctgggaaacacagacagacacagcatcaagaagaacctgatcggagcactgctgttcgacagcggagaaacagcagaagcaacaagactgaagagaacagcaagaagaagatacacaagaagaaagaacagaatctgctacctgcaggaaatcttcagcaacgaaatggcaaaggtcgacgacagcttcttccacagactggaagaaagcttcctggtcgaagaagacaagaagcacgaaagacacccgatcttcggaaacatcgtcgacgaagtcgcataccacgaaaagtacccgacaatctaccacctgagaaagaagctggtcgacagcacagacaaggcagacctgagactgatctacctggcactggcacacatgatcaagttcagaggacacttcctgatcgaaggagacctgaacccggacaacagcgacgtcgacaagctgttcatccagctggtccagacatacaaccagctgttcgaagaaaacccgatcaacgcaagcggagtcgacgcaaaggcaatcctgagcgcaagactgagcaagagcagaagactggaaaacctgatcgcacagctgccgggagaaaagaagaacggactgttcggaaacctgatcgcactgagcctgggactgacaccgaacttcaagagcaacttcgacctggcagaagacgcaaagctgcagctgagcaaggacacatacgacgacgacctggacaacctgctggcacagatcggagaccagtacgcagacctgttcctggcagcaaagaacctgagcgacgcaatcctgctgagcgacatcctgagagtcaacacagaaatcacaaaggcaccgctgagcgcaagcatgatcaagagatacgacgaacaccaccaggacctgacactgctgaaggcactggtcagacagcagctgccggaaaagtacaaggaaatcttcttcgaccagagcaagaacggatacgcaggatacatcgacggaggagcaagccaggaagaattctacaagttcatcaagccgatcctggaaaagatggacggaacagaagaactgctggtcaagctgaacagagaagacctgctgagaaagcagagaacattcgacaacggaagcatcccgcaccagatccacctgggagaactgcacgcaatcctgagaagacaggaagacttctacccgttcctgaaggacaacagagaaaagatcgaaaagatcctgacattcagaatcccgtactacgtcggaccgctggcaagaggaaacagcagattcgcatggatgacaagaaagagcgaagaaacaatcacaccgtggaacttcgaagaagtcgtcgacaagggagcaagcgcacagagcttcatcgaaagaatgacaaacttcgacaagaacctgccgaacgaaaaggtcctgccgaagcacagcctgctgtacgaatacttcacagtctacaacgaactgacaaaggtcaagtacgtcacagaaggaatgagaaagccggcattcctgagcggagaacagaagaaggcaatcgtcgacctgctgttcaagacaaacagaaaggtcacagtcaagcagctgaaggaagactacttcaagaagatcgaatgcttcgacagcgtcgaaatcagcggagtcgaagacagattcaacgcaagcctgggaacataccacgacctgctgaagatcatcaaggacaaggacttcctggacaacgaagaaaacgaagacatcctggaagacatcgtcctgacactgacactgttcgaagacagagaaatgatcgaagaaagactgaagacatacgcacacctgttcgacgacaaggtcatgaagcagctgaagagaagaagatacacaggatggggaagactgagcagaaagctgatcaacggaatcagagacaagcagagcggaaagacaatcctggacttcctgaagagcgacggattcgcaaacagaaacttcatgcagctgatccacgacgacagcctgacattcaaggaagacatccagaaggcacaggtcagcggacagggagacagcctgcacgaacacatcgcaaacctggcaggaagcccggcaatcaagaagggaatcctgcagacagtcaaggtcgtcgacgaactggtcaaggtcatgggaagacacaagccggaaaacatcgtcatcgaaatggcaagagaaaaccagacaacacagaagggacagaagaacagcagagaaagaatgaagagaatcgaagaaggaatcaaggaactgggaagccagatcctgaaggaacacccggtcgaaaacacacagctgcagaacgaaaagctgtacctgtactacctgcagaacggaagagacatgtacgtcgaccaggaactggacatcaacagactgagcgactacgacgtcgaccacatcgtcccgcagagcttcctgaaggacgacagcatcgacaacaaggtcctgacaagaagcgacaagaacagaggaaagagcgacaacgtcccgagcgaagaagtcgtcaagaagatgaagaactactggagacagctgctgaacgcaaagctgatcacacagagaaagttcgacaacctgacaaaggcagagagaggaggactgagcgaactggacaaggcaggattcatcaagagacagctggtcgaaacaagacagatcacaaagcacgtcgcacagatcctggacagcagaatgaacacaaagtacgacgaaaacgacaagctgatcagagaagtcaaggtcatcacactgaagagcaagctggtcagcgacttcagaaaggacttccagttctacaaggtcagagaaatcaacaactaccaccacgcacacgacgcatacctgaacgcagtcgtcggaacagcactgatcaagaagtacccgaagctggaaagcgaattcgtctacggagactacaaggtctacgacgtcagaaagatgatcgcaaagagcgaacaggaaatcggaaaggcaacagcaaagtacttcttctacagcaacatcatgaacttcttcaagacagaaatcacactggcaaacggagaaatcagaaagagaccgctgatcgaaacaaacggagaaacaggagaaatcgtctgggacaagggaagagacttcgcaacagtcagaaaggtcctgagcatgccgcaggtcaacatcgtcaagaagacagaagtccagacaggaggattcagcaaggaaagcatcctgccgaagagaaacagcgacaagctgatcgcaagaaagaaggactgggacccgaagaagtacggaggattcgacagcccgacagtcgcatacagcgtcctggtcgtcgcaaaggtcgaaaagggaaagagcaagaagctgaagagcgtcaaggaactgctgggaatcacaatcatggaaagaagcagcttcgaaaagaacccgatcgacttcctggaagcaaagggatacaaggaagtcaagaaggacctgatcatcaagctgccgaagtacagcctgttcgaactggaaaacggaagaaagagaatgctggcaagcgcaggagaactgcagaagggaaacgaactggcactgccgagcaagtacgtcaacttcctgtacctggcaagccactacgaaaagctgaagggaagcccggaagacaacgaacagaagcagctgttcgtcgaacagcacaagcactacctggacgaaatcatcgaacagatcagcgaattcagcaagagagtcatcctggcagacgcaaacctggacaaggtcctgagcgcatacaacaagcacagagacaagccgatcagagaacaggcagaaaacatcatccacctgttcacactgacaaacctgggagcaccggcagcattcaagtacttcgacacaacaatcgacagaaagagatacacaagcacaaaggaagtcctggacgcaacactgatccaccagagcatcacaggactgtacgaaacaagaatcgacctgagccagctgggaggagac

SEQ ID NO: 76 - protein, 1391 aa, synthetic construct
  REGION 1..1391: note = Synthetic
DKKYSIGLAIGTNSVGWAVITDEYKVPSKKFKVLGNTDRHSIKKNLIGALLFDSGETAEATRLKRTARRRYTRRKNRICYLQEIFSNEMAKVDDSFFHRLEESFLVEEDKKHERHPIFGNIVDEVAYHEKYPTIYHLRKKLVDSTDKADLRLIYLALAHMIKFRGHFLIEGDLNPDNSDVDKLFIQLVQTYNQLFEENPINASGVDAKAILSARLSKSRRLENLIAQLPGEKKNGLFGNLIALSLGLTPNFKSNFDLAEDAKLQLSKDTYDDDLDNLLAQIGDQYADLFLAAKNLSDAILLSDILRVNTEITKAPLSASMIKRYDEHHQDLTLLKALVRQQLPEKYKEIFFDQSKNGYAGYIDGGASQEEFYKFIKPILEKMDGTEELLVKLNREDLLRKQRTFDNGSIPHQIHLGELHAILRRQEDFYPFLKDNREKIEKILTFRIPYYVGPLARGNSRFAWMTRKSEETITPWNFEEVVDKGASAQSFIERMTNFDKNLPNEKVLPKHSLLYEYFTVYNELTKVKYVTEGMRKPAFLSGEQKKAIVDLLFKTNRKVTVKQLKEDYFKKIECFDSVEISGVEDRFNASLGTYHDLLKIIKDKDFLDNEENEDILEDIVLTLTLFEDREMIEERLKTYAHLFDDKVMKQLKRRRYTGWGRLSRKLINGIRDKQSGKTILDFLKSDGFANRNFMQLIHDDSLTFKEDIQKAQVSGQGDSLHEHIANLAGSPAIKKGILQTVKVVDELVKVMGRHKPENIVIEMARENQTTQKGQKNSRERMKRIEEGIKELGSQILKEHPVENTQLQNEKLYLYYLQNGRDMYVDQELDINRLSDYDVDHIVPQSFLKDDSIDNKVLTRSDKNRGKSDNVPSEEVVKKMKNYWRQLLNAKLITQRKFDNLTKAERGGLSELDKAGFIKRQLVETRQITKHVAQILDSRMNTKYDENDKLIREVKVITLKSKLVSDFRKDFQFYKVREINNYHHAHDAYLNAVVGTALIKKYPKLESEFVYGDYKVYDVRKMIAKSEQEIGKATAKYFFYSNIMNFFKTEITLANGEIRKRPLIETNGETGEIVWDKGRDFATVRKVLSMPQVNIVKKTEVQTGGFSKESILPKRNSDKLIARKKDWDPKKYGGFDSPTVAYSVLVVAKVEKGKSKKLKSVKELLGITIMERSSFEKNPIDFLEAKGYKEVKKDLIIKLPKYSLFELENGRKRMLASAGELQKGNELALPSKYVNFLYLASHYEKLKGSPEDNEQKQLFVEQHKHYLDEIIEQISEFSKRVILADANLDKVLSAYNKHRDKPIREQAENIIHLFTLTNLGAPAAFKYFDTTIDRKRYTSTKEVLDATLIHQSITGLYETRIDLSQLGGDGSGSPKKKRKVDGSPKKKRKVDSG

SEQ ID NO: 77 - RNA, 4179 nt, synthetic construct
  misc_feature 1..4179: note = Synthetic
  source 1..4179: mol_type = other RNA
atggacaagaagtacagcatcggactggcaatcggaacaaacagcgtcggatgggcagtcatcacagacgaatacaaggtcccgagcaagaagttcaaggtcctgggaaacacagacagacacagcatcaagaagaacctgatcggagcactgctgttcgacagcggagaaacagcagaagcaacaagactgaagagaacagcaagaagaagatacacaagaagaaagaacagaatctgctacctgcaggaaatcttcagcaacgaaatggcaaaggtcgacgacagcttcttccacagactggaagaaagcttcctggtcgaagaagacaagaagcacgaaagacacccgatcttcggaaacatcgtcgacgaagtcgcataccacgaaaagtacccgacaatctaccacctgagaaagaagctggtcgacagcacagacaaggcagacctgagactgatctacctggcactggcacacatgatcaagttcagaggacacttcctgatcgaaggagacctgaacccggacaacagcgacgtcgacaagctgttcatccagctggtccagacatacaaccagctgttcgaagaaaacccgatcaacgcaagcggagtcgacgcaaaggcaatcctgagcgcaagactgagcaagagcagaagactggaaaacctgatcgcacagctgccgggagaaaagaagaacggactgttcggaaacctgatcgcactgagcctgggactgacaccgaacttcaagagcaacttcgacctggcagaagacgcaaagctgcagctgagcaaggacacatacgacgacgacctggacaacctgctggcacagatcggagaccagtacgcagacctgttcctggcagcaaagaacctgagcgacgcaatcctgctgagcgacatcctgagagtcaacacagaaatcacaaaggcaccgctgagcgcaagcatgatcaagagatacgacgaacaccaccaggacctgacactgctgaaggcactggtcagacagcagctgccggaaaagtacaaggaaatcttcttcgaccagagcaagaacggatacgcaggatacatcgacggaggagcaagccaggaagaattctacaagttcatcaagccgatcctggaaaagatggacggaacagaagaactgctggtcaagctgaacagagaagacctgctgagaaagcagagaacattcgacaacggaagcatcccgcaccagatccacctgggagaactgcacgcaatcctgagaagacaggaagacttctacccgttcctgaaggacaacagagaaaagatcgaaaagatcctgacattcagaatcccgtactacgtcggaccgctggcaagaggaaacagcagattcgcatggatgacaagaaagagcgaagaaacaatcacaccgtggaacttcgaagaagtcgtcgacaagggagcaagcgcacagagcttcatcgaaagaatgacaaacttcgacaagaacctgccgaacgaaaaggtcctgccgaagcacagcctgctgtacgaatacttcacagtctacaacgaactgacaaaggtcaagtacgtcacagaaggaatgagaaagccggcattcctgagcggagaacagaagaaggcaatcgtcgacctgctgttcaagacaaacagaaaggtcacagtcaagcagctgaaggaagactacttcaagaagatcgaatgcttcgacagcgtcgaaatcagcggagtcgaagacagattcaacgcaagcctgggaacataccacgacctgctgaagatcatcaaggacaaggacttcctggacaacgaagaaaacgaagacatcctggaagacatcgtcctgacactgacactgttcgaagacagagaaatgatcgaagaaagactgaagacatacgcacacctgttcgacgacaaggtcatgaagcagctgaagagaagaagatacacaggatggggaagactgagcagaaagctgatcaacggaatcagagacaagcagagcggaaagacaatcctggacttcctgaagagcgacggattcgcaaacagaaacttcatgcagctgatccacgacgacagcctgacattcaaggaagacatccagaaggcacaggtcagcggacagggagacagcctgcacgaacacatcgcaaacctggcaggaagcccggcaatcaagaagggaatcctgcagacagtcaaggtcgtcgacgaactggtcaaggtcatgggaagacacaagccggaaaacatcgtcatcgaaatggcaagagaaaaccagacaacacagaagggacagaagaacagcagagaaagaatgaagagaatcgaagaaggaatcaaggaactgggaagccagatcctgaaggaacacccggtcgaaaacacacagctgcagaacgaaaagctgtacctgtactacctgcagaacggaagagacatgtacgtcgaccaggaactggacatcaacagactgagcgactacgacgtcgaccacatcgtcccgcagagcttcctgaaggacgacagcatcgacaacaaggtcctgacaagaagcgacaagaacagaggaaagagcgacaacgtcccgagcgaagaagtcgtcaagaagatgaagaactactggagacagctgctgaacgcaaagctgatcacacagagaaagttcgacaacctgacaaaggcagagagaggaggactgagcgaactggacaaggcaggattcatcaagagacagctggtcgaaacaagacagatcacaaagcacgtcgcacagatcctggacagcagaatgaacacaaagtacgacgaaaacgacaagctgatcagagaagtcaaggtcatcacactgaagagcaagctggtcagcgacttcagaaaggacttccagttctacaaggtcagagaaatcaacaactaccaccacgcacacgacgcatacctgaacgcagtcgtcggaacagcactgatcaagaagtacccgaagctggaaagcgaattcgtctacggagactacaaggtctacgacgtcagaaagatgatcgcaaagagcgaacaggaaatcggaaaggcaacagcaaagtacttcttctacagcaacatcatgaacttcttcaagacagaaatcacactggcaaacggagaaatcagaaagagaccgctgatcgaaacaaacggagaaacaggagaaatcgtctgggacaagggaagagacttcgcaacagtcagaaaggtcctgagcatgccgcaggtcaacatcgtcaagaagacagaagtccagacaggaggattcagcaaggaaagcatcctgccgaagagaaacagcgacaagctgatcgcaagaaagaaggactgggacccgaagaagtacggaggattcgacagcccgacagtcgcatacagcgtcctggtcgtcgcaaaggtcgaaaagggaaagagcaagaagctgaagagcgtcaaggaactgctgggaatcacaatcatggaaagaagcagcttcgaaaagaacccgatcgacttcctggaagcaaagggatacaaggaagtcaagaaggacctgatcatcaagctgccgaagtacagcctgttcgaactggaaaacggaagaaagagaatgctggcaagcgcaggagaactgcagaagggaaacgaactggcactgccgagcaagtacgtcaacttcctgtacctggcaagccactacgaaaagctgaagggaagcccggaagacaacgaacagaagcagctgttcgtcgaacagcacaagcactacctggacgaaatcatcgaacagatcagcgaattcagcaagagagtcatcctggcagacgcaaacctggacaaggtcctgagcgcatacaacaagcacagagacaagccgatcagagaacaggcagaaaacatcatccacctgttcacactgacaaacctgggagcaccggcagcattcaagtacttcgacacaacaatcgacagaaagagatacacaagcacaaaggaagtcctggacgcaacactgatccaccagagcatcacaggactgtacgaaacaagaatcgacctgagccagctgggaggagacggaagcggaagcccgaagaagaagagaaaggtcgacggaagcccgaagaagaagagaaaggtcgacagcggatag

SEQ ID NO: 78 - RNA, 4173 nt, synthetic construct
  misc_feature 1..4173: note = Synthetic
  source 1..4173: mol_type = other RNA
gacaagaagtacagcatcggactggcaatcggaacaaacagcgtcggatgggcagtcatcacagacgaatacaaggtcccgagcaagaagttcaaggtcctgggaaacacagacagacacagcatcaagaagaacctgatcggagcactgctgttcgacagcggagaaacagcagaagcaacaagactgaagagaacagcaagaagaagatacacaagaagaaagaacagaatctgctacctgcaggaaatcttcagcaacgaaatggcaaaggtcgacgacagcttcttccacagactggaagaaagcttcctggtcgaagaagacaagaagcacgaaagacacccgatcttcggaaacatcgtcgacgaagtcgcataccacgaaaagtacccgacaatctaccacctgagaaagaagctggtcgacagcacagacaaggcagacctgagactgatctacctggcactggcacacatgatcaagttcagaggacacttcctgatcgaaggagacctgaacccggacaacagcgacgtcgacaagctgttcatccagctggtccagacatacaaccagctgttcgaagaaaacccgatcaacgcaagcggagtcgacgcaaaggcaatcctgagcgcaagactgagcaagagcagaagactggaaaacctgatcgcacagctgccgggagaaaagaagaacggactgttcggaaacctgatcgcactgagcctgggactgacaccgaacttcaagagcaacttcgacctggcagaagacgcaaagctgcagctgagcaaggacacatacgacgacgacctggacaacctgctggcacagatcggagaccagtacgcagacctgttcctggcagcaaagaacctgagcgacgcaatcctgctgagcgacatcctgagagtcaacacagaaatcacaaaggcaccgctgagcgcaagcatgatcaagagatacgacgaacaccaccaggacctgacactgctgaaggcactggtcagacagcagctgccggaaaagtacaaggaaatcttcttcgaccagagcaagaacggatacgcaggatacatcgacggaggagcaagccaggaagaattctacaagttcatcaagccgatcctggaaaagatggacggaacagaagaactgctggtcaagctgaacagagaagacctgctgagaaagcagagaacattcgacaacggaagcatcccgcaccagatccacctgggagaactgcacgcaatcctgagaagacaggaagacttctacccgttcctgaaggacaacagagaaaagatcgaaaagatcctgacattcagaatcccgtactacgtcggaccgctggcaagaggaaacagcagattcgcatggatgacaagaaagagcgaagaaacaatcacaccgtggaacttcgaagaagtcgtcgacaagggagcaagcgcacagagcttcatcgaaagaatgacaaacttcgacaagaacctgccgaacgaaaaggtcctgccgaagcacagcctgctgtacgaatacttcacagtctacaacgaactgacaaaggtcaagtacgtcacagaaggaatgagaaagccggcattcctgagcggagaacagaagaaggcaatcgtcgacctgctgttcaagacaaacagaaaggtcacagtcaagcagctgaaggaagactacttcaagaagatcgaatgcttcgacagcgtcgaaatcagcggagtcgaagacagattcaacgcaagcctgggaacataccacgacctgctgaagatcatcaaggacaaggacttcctggacaacgaagaaaacgaagacatcctggaagacatcgtcctgacactgacactgttcgaagacagagaaatgatcgaagaaagactgaagacatacgcacacctgttcgacgacaaggtcatgaagcagctgaagagaagaagatacacaggatggggaagactgagcagaaagctgatcaacggaatcagagacaagcagagcggaaagacaatcctggacttcctgaagagcgacggattcgcaaacagaaacttcatgcagctgatccacgacgacagcctgacattcaaggaagacatccagaaggcacaggtcagcggacagggagacagcctgcacgaacacatcgcaaacctggcaggaagcccggcaatcaagaagggaatcctgcagacagtcaaggtcgtcgacgaactggtcaaggtcatgggaagacacaagccggaaaacatcgtcatcgaaatggcaagagaaaaccagacaacacagaagggacagaagaacagcagagaaagaatgaagagaatcgaagaaggaatcaaggaactgggaagccagatcctgaaggaacacccggtcgaaaacacacagctgcagaacgaaaagctgtacctgtactacctgcagaacggaagagacatgtacgtcgaccaggaactggacatcaacagactgagcgactacgacgtcgaccacatcgtcccgcagagcttcctgaaggacgacagcatcgacaacaaggtcctgacaagaagcgacaagaacagaggaaagagcgacaacgtcccgagcgaagaagtcgtcaagaagatgaagaactactggagacagctgctgaacgcaaagctgatcacacagagaaagttcgacaacctgacaaaggcagagagaggaggactgagcgaactggacaaggcaggattcatcaagagacagctggtcgaaacaagacagatcacaaagcacgtcgcacagatcctggacagcagaatgaacacaaagtacgacgaaaacgacaagctgatcagagaagtcaaggtcatcacactgaagagcaagctggtcagcgacttcagaaaggacttccagttctacaaggtcagagaaatcaacaactaccaccacgcacacgacgcatacctgaacgcagtcgtcggaacagcactgatcaagaagtacccgaagctggaaagcgaattcgtctacggagactacaaggtctacgacgtcagaaagatgatcgcaaagagcgaacaggaaatcggaaaggcaacagcaaagtacttcttctacagcaacatcatgaacttcttcaagacagaaatcacactggcaaacggagaaatcagaaagagaccgctgatcgaaacaaacggagaaacaggagaaatcgtctgggacaagggaagagacttcgcaacagtcagaaaggtcctgagcatgccgcaggtcaacatcgtcaagaagacagaagtccagacaggaggattcagcaaggaaagcatcctgccgaagagaaacagcgacaagctgatcgcaagaaagaaggactgggacccgaagaagtacggaggattcgacagcccgacagtcgcatacagcgtcctggtcgtcgcaaaggtcgaaaagggaaagagcaagaagctgaagagcgtcaaggaactgctgggaatcacaatcatggaaagaagcagcttcgaaaagaacccgatcgacttcctggaagcaaagggatacaaggaagtcaagaaggacctgatcatcaagctgccgaagtacagcctgttcgaactggaaaacggaagaaagagaatgctggcaagcgcaggagaactgcagaagggaaacgaactggcactgccgagcaagtacgtcaacttcctgtacctggcaagccactacgaaaagctgaagggaagcccggaagacaacgaacagaagcagctgttcgtcgaacagcacaagcactacctggacgaaatcatcgaacagatcagcgaattcagcaagagagtcatcctggcagacgcaaacctggacaaggtcctgagcgcatacaacaagcacagagacaagccgatcagagaacaggcagaaaacatcatccacctgttcacactgacaaacctgggagcaccggcagcattcaagtacttcgacacaacaatcgacagaaagagatacacaagcacaaaggaagtcctggacgcaacactgatccaccagagcatcacaggactgtacgaaacaagaatcgacctgagccagctgggaggagacggaagcggaagcccgaagaagaagagaaaggtcgacggaagcccgaagaagaagagaaaggtcgacagcgga

SEQ ID NO: 79 - DNA, 4140 bp, synthetic construct
  misc_feature 1..4140: note = Synthetic
  source 1..4140: mol_type = other DNA
atggacaagaagtactccatcggcctggccatcggcaccaactccgtgggctgggccgtgatcaccgacgagtacaaggtgccctccaagaagttcaaggtgctgggcaacaccgaccggcactccatcaagaagaacctgatcggcgccctgctgttcgactccggcgagaccgccgaggccacccggctgaagcggaccgcccggcggcggtacacccggcggaagaaccggatctgctacctgcaggagatcttctccaacgagatggccaaggtggacgactccttcttccaccggctggaggagtccttcctggtggaggaggacaagaagcacgagcggcaccccatcttcggcaacatcgtggacgaggtggcctaccacgagaagtaccccaccatctaccacctgcggaagaagctggtggactccaccgacaaggccgacctgcggctgatctacctggccctggcccacatgatcaagttccggggccacttcctgatcgagggcgacctgaaccccgacaactccgacgtggacaagctgttcatccagctggtgcagacctacaaccagctgttcgaggagaaccccatcaacgcctccggcgtggacgccaaggccatcctgtccgcccggctgtccaagtcccggcggctggagaacctgatcgcccagctgcccggcgagaagaagaacggcctgttcggcaacctgatcgccctgtccctgggcctgacccccaacttcaagtccaacttcgacctggccgaggacgccaagctgcagctgtccaaggacacctacgacgacgacctggacaacctgctggcccagatcggcgaccagtacgccgacctgttcctggccgccaagaacctgtccgacgccatcctgctgtccgacatcctgcgggtgaacaccgagatcaccaaggcccccctgtccgcctccatgatcaagcggtacgacgagcaccaccaggacctgaccctgctgaaggccctggtgcggcagcagctgcccgagaagtacaaggagatcttcttcgaccagtccaagaacggctacgccggctacatcgacggcggcgcctcccaggaggagttctacaagttcatcaagcccatcctggagaagatggacggcaccgaggagctgctggtgaagctgaaccgggaggacctgctgcggaagcagcggaccttcgacaacggctccatcccccaccagatccacctgggcgagctgcacgccatcctgcggcggcaggaggacttctaccccttcctgaaggacaaccgggagaagatcgagaagatcctgaccttccggatcccctactacgtgggccccctggcccggggcaactcccggttcgcctggatgacccggaagtccgaggagaccatcaccccctggaacttcgaggaggtggtggacaagggcgcctccgcccagtccttcatcgagcggatgaccaacttcgacaagaacctgcccaacgagaaggtgctgcccaagcactccctgctgtacgagtacttcaccgtgtacaacgagctgaccaaggtgaagtacgtgaccgagggcatgcggaagcccgccttcctgtccggcgagcagaagaaggccatcgtggacctgctgttcaagaccaaccggaaggtgaccgtgaagcagctgaaggaggactacttcaagaagatcgagtgcttcgactccgtggagatctccggcgtggaggaccggttcaacgcctccctgggcacctaccacgacctgctgaagatcatcaaggacaaggacttcctggacaacgaggagaacgaggacatcctggaggacatcgtgctgaccctgaccctgttcgaggaccgggagatgatcgaggagcggctgaagacctacgcccacctgttcgacgacaaggtgatgaagcagctgaagcggcggcggtacaccggctggggccggctgtcccggaagctgatcaacggcatccgggacaagcagtccggcaagaccatcctggacttcctgaagtccgacggcttcgccaaccggaacttcatgcagctgatccacgacgactccctgaccttcaaggaggacatccagaaggcccaggtgtccggccagggcgactccctgcacgagcacatcgccaacctggccggctcccccgccatcaagaagggcatcctgcagaccgtgaaggtggtggacgagctggtgaaggtgatgggccggcacaagcccgagaacatcgtgatcgagatggcccgggagaaccagaccacccagaagggccagaagaactcccgggagcggatgaagcggatcgaggagggcatcaaggagctgggctcccagatcctgaaggagcaccccgtggagaacacccagctgcagaacgagaagctgtacctgtactacctgcagaacggccgggacatgtacgtggaccaggagctggacatcaaccggctgtccgactacgacgtggaccacatcgtgccccagtccttcctgaaggacgactccatcgacaacaaggtgctgacccggtccgacaagaaccggggcaagtccgacaacgtgccctccgaggaggtggtgaagaagatgaagaactactggcggcagctgctgaacgccaagctgatcacccagcggaagttcgacaacctgaccaaggccgagcggggcggcctgtccgagctggacaaggccggcttcatcaagcggcagctggtggagacccggcagatcaccaagcacgtggcccagatcctggactcccggatgaacaccaagtacgacgagaacgacaagctgatccgggaggtgaaggtgatcaccctgaagtccaagctggtgtccgacttccggaaggacttccagttctacaaggtgcgggagatcaacaactaccaccacgcccacgacgcctacctgaacgccgtggtgggcaccgccctgatcaagaagtaccccaagctggagtccgagttcgtgtacggcgactacaaggtgtacgacgtgcggaagatgatcgccaagtccgagcaggagatcggcaaggccaccgccaagtacttcttctactccaacatcatgaacttcttcaagaccgagatcaccctggccaacggcgagatccggaagcggcccctgatcgagaccaacggcgagaccggcgagatcgtgtgggacaagggccgggacttcgccaccgtgcggaaggtgctgtccatgccccaggtgaacatcgtgaagaagaccgaggtgcagaccggcggcttctccaaggagtccatcctgcccaagcggaactccgacaagctgatcgcccggaagaaggactgggaccccaagaagtacggcggcttcgactcccccaccgtggcctactccgtgctggtggtggccaaggtggagaagggcaagtccaagaagctgaagtccgtgaaggagctgctgggcatcaccatcatggagcggtcctccttcgagaagaaccccatcgacttcctggaggccaagggctacaaggaggtgaagaaggacctgatcatcaagctgcccaagtactccctgttcgagctggagaacggccggaagcggatgctggcctccgccggcgagctgcagaagggcaacgagctggccctgccctccaagtacgtgaacttcctgtacctggcctcccactacgagaagctgaagggctcccccgaggacaacgagcagaagcagctgttcgtggagcagcacaagcactacctggacgagatcatcgagcagatctccgagttctccaagcgggtgatcctggccgacgccaacctggacaaggtgctgtccgcctacaacaagcaccgggacaagcccatccgggagcaggccgagaacatcatccacctgttcaccctgaccaacctgggcgcccccgccgccttcaagtacttcgacaccaccatcgaccggaagcggtacacctccaccaaggaggtgctggacgccaccctgatccaccagtccatcaccggcctgtacgagacccggatcgacctgtcccagctgggcggcgacggcggcggctcccccaagaagaagcggaaggtgtga

SEQ ID NO: 80 - DNA, 4107 bp, synthetic construct
  misc_feature 1..4107: note = Synthetic
  source 1..4107: mol_type = other DNA
atggacaagaagtactccatcggcctggccatcggcaccaactccgtgggctgggccgtgatcaccgacgagtacaaggtgccctccaagaagttcaaggtgctgggcaacaccgaccggcactccatcaagaagaacctgatcggcgccctgctgttcgactccggcgagaccgccgaggccacccggctgaagcggaccgcccggcggcggtacacccggcggaagaaccggatctgctacctgcaggagatcttctccaacgagatggccaaggtggacgactccttcttccaccggctggaggagtccttcctggtggaggaggacaagaagcacgagcggcaccccatcttcggcaacatcgtggacgaggtggcctaccacgagaagtaccccaccatctaccacctgcggaagaagctggtggactccaccgacaaggccgacctgcggctgatctacctggccctggcccacatgatcaagttccggggccacttcctgatcgagggcgacctgaaccccgacaactccgacgtggacaagctgttcatccagctggtgcagacctacaaccagctgttcgaggagaaccccatcaacgcctccggcgtggacgccaaggccatcctgtccgcccggctgtccaagtcccggcggctggagaacctgatcgcccagctgcccggcgagaagaagaacggcctgttcggcaacctgatcgccctgtccctgggcctgacccccaacttcaagtccaacttcgacctggccgaggacgccaagctgcagctgtccaaggacacctacgacgacgacctggacaacctgctggcccagatcggcgaccagtacgccgacctgttcctggccgccaagaacctgtccgacgccatcctgctgtccgacatcctgcgggtgaacaccgagatcaccaaggcccccctgtccgcctccatgatcaagcggtacgacgagcaccaccaggacctgaccctgctgaaggccctggtgcggcagcagctgcccgagaagtacaaggagatcttcttcgaccagtccaagaacggctacgccggctacatcgacggcggcgcctcccaggaggagttctacaagttcatcaagcccatcctggagaagatggacggcaccgaggagctgctggtgaagctgaaccgggaggacctgctgcggaagcagcggaccttcgacaacggctccatcccccaccagatccacctgggcgagctgcacgccatcctgcggcggcaggaggacttctaccccttcctgaaggacaaccgggagaagatcgagaagatcctgaccttccggatcccctactacgtgggccccctggcccggggcaactcccggttcgcctggatgacccggaagtccgaggagaccatcaccccctggaacttcgaggaggtggtggacaagggcgcctccgcccagtccttcatcgagcggatgaccaacttcgacaagaacctgcccaacgagaaggtgctgcccaagcactccctgctgtacgagtacttcaccgtgtacaacgagctgaccaaggtgaagtacgtgaccgagggcatgcggaagcccgccttcctgtccggcgagcagaagaaggccatcgtggacctgctgttcaagaccaaccggaaggtgaccgtgaagcagctgaaggaggactacttcaagaagatcgagtgcttcgactccgtggagatctccggcgtggaggaccggttcaacgcctccctgggcacctaccacgacctgctgaagatcatcaaggacaaggacttcctggacaacgaggagaacgaggacatcctggaggacatcgtgctgaccctgaccctgttcgaggaccgggagatgatcgaggagcggctgaagacctacgcccacctgttcgacgacaaggtgatgaagcagctgaagcggcggcggtacaccggctggggccggctgtcccggaagctgatcaacggcatccgggacaagcagtccggcaagaccatcctggacttcctgaagtccgacggcttcgccaaccggaacttcatgcagctgatccacgacgactccctgaccttcaaggaggacatccagaaggcccaggtgtccggccagggcgactccctgcacgagcacatcgccaacctggccggctcccccgccatcaagaagggcatcctgcagaccgtgaaggtggtggacgagctggtgaaggtgatgggccggcacaagcccgagaacatcgtgatcgagatggcccgggagaaccagaccacccagaagggccagaagaactcccgggagcggatgaagcggatcgaggagggcatcaaggagctgggctcccagatcctgaaggagcaccccgtggagaacacccagctgcagaacgagaagctgtacctgtactacctgcagaacggccgggacatgtacgtggaccaggagctggacatcaaccggctgtccgactacgacgtggaccacatcgtgccccagtccttcctgaaggacgactccatcgacaacaaggtgctgacccggtccgacaagaaccggggcaagtccgacaacgtgccctccgaggaggtggtgaagaagatgaagaactactggcggcagctgctgaacgccaagctgatcacccagcggaagttcgacaacctgaccaaggccgagcggggcggcctgtccgagctggacaaggccggcttcatcaagcggcagctggtggagacccggcagatcaccaagcacgtggcccagatcctggactcccggatgaacaccaagtacgacgagaacgacaagctgatccgggaggtgaaggtgatcaccctgaagtccaagctggtgtccgacttccggaaggacttccagttctacaaggtgcgggagatcaacaactaccaccacgcccacgacgcctacctgaacgccgtggtgggcaccgccctgatcaagaagtaccccaagctggagtccgagttcgtgtacggcgactacaaggtgtacgacgtgcggaagatgatcgccaagtccgagcaggagatcggcaaggccaccgccaagtacttcttctactccaacatcatgaacttcttcaagaccgagatcaccctggccaacggcgagatccggaagcggcccctgatcgagaccaacggcgagaccggcgagatcgtgtgggacaagggccgggacttcgccaccgtgcggaaggtgctgtccatgccccaggtgaacatcgtgaagaagaccgaggtgcagaccggcggcttctccaaggagtccatcctgcccaagcggaactccgacaagctgatcgcccggaagaaggactgggaccccaagaagtacggcggcttcgactcccccaccgtggcctactccgtgctggtggtggccaaggtggagaagggcaagtccaagaagctgaagtccgtgaaggagctgctgggcatcaccatcatggagcggtcctccttcgagaagaaccccatcgacttcctggaggccaagggctacaaggaggtgaagaaggacctgatcatcaagctgcccaagtactccctgttcgagctggagaacggccggaagcggatgctggcctccgccggcgagctgcagaagggcaacgagctggccctgccctccaagtacgtgaacttcctgtacctggcctcccactacgagaagctgaagggctcccccgaggacaacgagcagaagcagctgttcgtggagcagcacaagcactacctggacgagatcatcgagcagatctccgagttctccaagcgggtgatcctggccgacgccaacctggacaaggtgctgtccgcctacaacaagcaccgggacaagcccatccgggagcaggccgagaacatcatccacctgttcaccctgaccaacctgggcgcccccgccgccttcaagtacttcgacaccaccatcgaccggaagcggtacacctccaccaaggaggtgctggacgccaccctgatccaccagtccatcaccggcctgtacgagacccggatcgacctgtcccagctgggcggcgactga

SEQ ID NO: 81 - DNA, 4179 bp, synthetic construct
  misc_feature 1..4179: note = Synthetic
  source 1..4179: mol_type = other DNA
atggacaagaagtactccatcggcctggccatcggcaccaactccgtgggctgggccgtgatcaccgacgagtacaaggtgccctccaagaagttcaaggtgctgggcaacaccgaccggcactccatcaagaagaacctgatcggcgccctgctgttcgactccggcgagaccgccgaggccacccggctgaagcggaccgcccggcggcggtacacccggcggaagaaccggatctgctacctgcaggagatcttctccaacgagatggccaaggtggacgactccttcttccaccggctggaggagtccttcctggtggaggaggacaagaagcacgagcggcaccccatcttcggcaacatcgtggacgaggtggcctaccacgagaagtaccccaccatctaccacctgcggaagaagctggtggactccaccgacaaggccgacctgcggctgatctacctggccctggcccacatgatcaagttccggggccacttcctgatcgagggcgacctgaaccccgacaactccgacgtggacaagctgttcatccagctggtgcagacctacaaccagctgttcgaggagaaccccatcaacgcctccggcgtggacgccaaggccatcctgtccgcccggctgtccaagtcccggcggctggagaacctgatcgcccagctgcccggcgagaagaagaacggcctgttcggcaacctgatcgccctgtccctgggcctgacccccaacttcaagtccaacttcgacctggccgaggacgccaagctgcagctgtccaaggacacctacgacgacgacctggacaacctgctggcccagatcggcgaccagtacgccgacctgttcctggccgccaagaacctgtccgacgccatcctgctgtccgacatcctgcgggtgaacaccgagatcaccaaggcccccctgtccgcctccatgatcaagcggtacgacgagcaccaccaggacctgaccctgctgaaggccctggtgcggcagcagctgcccgagaagtacaaggagatcttcttcgaccagtccaagaacggctacgccggctacatcgacggcggcgcctcccaggaggagttctacaagttcatcaagcccatcctggagaagatggacggcaccgaggagctgctggtgaagctgaaccgggaggacctgctgcggaagcagcggaccttcgacaacggctccatcccccaccagatccacctgggcgagctgcacgccatcctgcggcggcaggaggacttctaccccttcctgaaggacaaccgggagaagatcgagaagatcctgaccttccggatcccctactacgtgggccccctggcccggggcaactcccggttcgcctggatgacccggaagtccgaggagaccatcaccccctggaacttcgaggaggtggtggacaagggcgcctccgcccagtccttcatcgagcggatgaccaacttcgacaagaacctgcccaacgagaaggtgctgcccaagcactccctgctgtacgagtacttcaccgtgtacaacgagctgaccaaggtgaagtacgtgaccgagggcatgcggaagcccgccttcctgtccggcgagcagaagaaggccatcgtggacctgctgttcaagaccaaccggaaggtgaccgtgaagcagctgaaggaggactacttcaagaagatcgagtgcttcgactccgtggagatctccggcgtggaggaccggttcaacgcctccctgggcacctaccacgacctgctgaagatcatcaaggacaaggacttcctggacaacgaggagaacgaggacatcctggaggacatcgtgctgaccctgaccctgttcgaggaccgggagatgatcgaggagcggctgaagacctacgcccacctgttcgacgacaaggtgatgaagcagctgaagcggcggcggtacaccggctggggccggctgtcccggaagctgatcaacggcatccgggacaagcagtccggcaagaccatcctggacttcctgaagtccgacggcttcgccaaccggaacttcatgcagctgatccacgacgactccctgaccttcaaggaggacatccagaaggcccaggtgtccggccagggcgactccctgcacgagcacatcgccaacctggccggctcccccgccatcaagaagggcatcctgcagaccgtgaaggtggtggacgagctggtgaaggtgatgggccggcacaagcccgagaacatcgtgatcgagatggcccgggagaaccagaccacccagaagggccagaagaactcccgggagcggatgaagcggatcgaggagggcatcaaggagctgggctcccagatcctgaaggagcaccccgtggagaacacccagctgcagaacgagaagctgtacctgtactacctgcagaacggccgggacatgtacgtggaccaggagctggacatcaaccggctgtccgactacgacgtggaccacatcgtgccccagtccttcctgaaggacgactccatcgacaacaaggtgctgacccggtccgacaagaaccggggcaagtccgacaacgtgccctccgaggaggtggtgaagaagatgaagaactactggcggcagctgctgaacgccaagctgatcacccagcggaagttcgacaacctgaccaaggccgagcggggcggcctgtccgagctggacaaggccggcttcatcaagcggcagctggtggagacccggcagatcaccaagcacgtggcccagatcctggactcccggatgaacaccaagtacgacgagaacgacaagctgatccgggaggtgaaggtgatcaccctgaagtccaagctggtgtccgacttccggaaggacttccagttctacaaggtgcgggagatcaacaactaccaccacgcccacgacgcctacctgaacgccgtggtgggcaccgccctgatcaagaagtaccccaagctggagtccgagttcgtgtacggcgactacaaggtgtacgacgtgcggaagatgatcgccaagtccgagcaggagatcggcaaggccaccgccaagtacttcttctactccaacatcatgaacttcttcaagaccgagatcaccctggccaacggcgagatccggaagcggcccctgatcgagaccaacggcgagaccggcgagatcgtgtgggacaagggccgggacttcgccaccgtgcggaaggtgctgtccatgccccaggtgaacatcgtgaagaagaccgaggtgcagaccggcggcttctccaaggagtccatcctgcccaagcggaactccgacaagctgatcgcccggaagaaggactgggaccccaagaagtacggcggcttcgactcccccaccgtggcctactccgtgctggtggtggccaaggtggagaagggcaagtccaagaagctgaagtccgtgaaggagctgctgggcatcaccatcatggagcggtcctccttcgagaagaaccccatcgacttcctggaggccaagggctacaaggaggtgaagaaggacctgatcatcaagctgcccaagtactccctgttcgagctggagaacggccggaagcggatgctggcctccgccggcgagctgcagaagggcaacgagctggccctgccctccaagtacgtgaacttcctgtacctggcctcccactacgagaagctgaagggctcccccgaggacaacgagcagaagcagctgttcgtggagcagcacaagcactacctggacgagatcatcgagcagatctccgagttctccaagcgggtgatcctggccgacgccaacctggacaaggtgctgtccgcctacaacaagcaccgggacaagcccatccgggagcaggccgagaacatcatccacctgttcaccctgaccaacctgggcgcccccgccgccttcaagtacttcgacaccaccatcgaccggaagcggtacacctccaccaaggaggtgctggacgccaccctgatccaccagtccatcaccggcctgtacgagacccggatcgacctgtcccagctgggcggcgacggctccggctcccccaagaagaagcggaaggtggacggctcccccaagaagaagcggaaggtggactccggctga

SEQ ID NO: 82 - DNA, 4140 bp, synthetic construct
  misc_feature 1..4140: note = Synthetic
  source 1..4140: mol_type = other DNA
atggacaagaagtacagcatcggcctggccatcggcaccaacagcgtgggctgggccgtgatcaccgacgagtacaaggtgcccagcaagaagttcaaggtgctgggcaacaccgaccggcacagcatcaagaagaacctgatcggcgccctgctgttcgacagcggcgagaccgccgaggccacccggctgaagcggaccgcccggcggcggtacacccggcggaagaaccggatctgctacctgcaggagatcttcagcaacgagatggccaaggtggacgacagcttcttccaccggctggaggagagcttcctggtggaggaggacaagaagcacgagcggcaccccatcttcggcaacatcgtggacgaggtggcctaccacgagaagtaccccaccatctaccacctgcggaagaagctggtggacagcaccgacaaggccgacctgcggctgatctacctggccctggcccacatgatcaagttccggggccacttcctgatcgagggcgacctgaaccccgacaacagcgacgtggacaagctgttcatccagctggtgcagacctacaaccagctgttcgaggagaaccccatcaacgccagcggcgtggacgccaaggccatcctgagcgcccggctgagcaagagccggcggctggagaacctgatcgcccagctgcccggcgagaagaagaacggcctgttcggcaacctgatcgccctgagcctgggcctgacccccaacttcaagagcaacttcgacctggccgaggacgccaagctgcagctgagcaaggacacctacgacgacgacctggacaacctgctggcccagatcggcgaccagtacgccgacctgttcctggccgccaagaacctgagcgacgccatcctgctgagcgacatcctgcgggtgaacaccgagatcaccaaggcccccctgagcgccagcatgatcaagcggtacgacgagcaccaccaggacctgaccctgctgaaggccctggtgcggcagcagctgcccgagaagtacaaggagatcttcttcgaccagagcaagaacggctacgccggctacatcgacggcggcgccagccaggaggagttctacaagttcatcaagcccatcctggagaagatggacggcaccgaggagctgctggtgaagctgaaccgggaggacctgctgcggaagcagcggaccttcgacaacggcagcatcccccaccagatccacctgggcgagctgcacgccatcctgcggcggcaggaggacttctaccccttcctgaaggacaaccgggagaagatcgagaagatcctgaccttccggatcccctactacgtgggccccctggcccggggcaacagccggttcgcctggatgacccggaagagcgaggagaccatcaccccctggaacttcgaggaggtggtggacaagggcgccagcgcccagagcttcatcgagcggatgaccaacttcgacaagaacctgcccaacgagaaggtgctgcccaagcacagcctgctgtacgagtacttcaccgtgtacaacgagctgaccaaggtgaagtacgtgaccgagggcatgcggaagcccgccttcctgagcggcgagcagaagaaggccatcgtggacctgctgttcaagaccaaccggaaggtgaccgtgaagcagctgaaggaggactacttcaagaagatcgagtgcttcgacagcgtggagatcagcggcgtggaggaccggttcaacgccagcctgggcacctaccacgacctgctgaagatcatcaaggacaaggacttcctggacaacgaggagaacgaggacatcctggaggacatcgtgctgaccctgaccctgttcgaggaccgggagatgatcgaggagcggctgaagacctacgcccacctgttcgacgacaaggtgatgaagcagctgaagcggcggcggtacaccggctggggccggctgagccggaagctgatcaacggcatccgggacaagcagagcggcaagaccatcctggacttcctgaagagcgacggcttcgccaaccggaacttcatgcagctgatccacgacgacagcctgaccttcaaggaggacatccagaaggcccaggtgagcggccagggcgacagcctgcacgagcacatcgccaacctggccggcagccccgccatcaagaagggcatcctgcagaccgtgaaggtggtggacgagctggtgaaggtgatgggccggcacaagcccgagaacatcgtgatcgagatggcccgggagaaccagaccacccagaagggccagaagaacagccgggagcggatgaagcggatcgaggagggcatcaaggagctgggcagccagatcctgaaggagcaccccgtggagaacacccagctgcagaacgagaagctgtacctgtactacctgcagaacggccgggacatgtacgtggaccaggagctggacatcaaccggctgagcgactacgacgtggaccacatcgtgccccagagcttcctgaaggacgacagcatcgacaacaaggtgctgacccggagcgacaagaaccggggcaagagcgacaacgtgcccagcgaggaggtggtgaagaagatgaagaactactggcggcagctgctgaacgccaagctgatcacccagcggaagttcgacaacctgaccaaggccgagcggggcggcctgagcgagctggacaaggccggcttcatcaagcggcagctggtggagacccggcagatcaccaagcacgtggcccagatcctggacagccggatgaacaccaagtacgacgagaacgacaagctgatccgggaggtgaaggtgatcaccctgaagagcaagctggtgagcgacttccggaaggacttccagttctacaaggtgcgggagatcaacaactaccaccacgcccacgacgcctacctgaacgccgtggtgggcaccgccctgatcaagaagtaccccaagctggagagcgagttcgtgtacggcgactacaaggtgtacgacgtgcggaagatgatcgccaagagcgagcaggagatcggcaaggccaccgccaagtacttcttctacagcaacatcatgaacttcttcaagaccgagatcaccctggccaacggcgagatccggaagcggcccctgatcgagaccaacggcgagaccggcgagatcgtgtgggacaagggccgggacttcgccaccgtgcggaaggtgctgagcatgccccaggtgaacatcgtgaagaagaccgaggtgcagaccggcggcttcagcaaggagagcatcctgcccaagcggaacagcgacaagctgatcgcccggaagaaggactgggaccccaagaagtacggcggcttcgacagccccaccgtggcctacagcgtgctggtggtggccaaggtggagaagggcaagagcaagaagctgaagagcgtgaaggagctgctgggcatcaccatcatggagcggagcagcttcgagaagaaccccatcgacttcctggaggccaagggctacaaggaggtgaagaaggacctgatcatcaagctgcccaagtacagcctgttcgagctggagaacggccggaagcggatgctggccagcgccggcgagctgcagaagggcaacgagctggccctgcccagcaagtacgtgaacttcctgtacctggccagccactacgagaagctgaagggcagccccgaggacaacgagcagaagcagctgttcgtggagcagcacaagcactacctggacgagatcatcgagcagatcagcgagttcagcaagcgggtgatcctggccgacgccaacctggacaaggtgctgagcgcctacaacaagcaccgggacaagcccatccgggagcaggccgagaacatcatccacctgttcaccctgaccaacctgggcgcccccgccgccttcaagtacttcgacaccaccatcgaccggaagcggtacaccagcaccaaggaggtgctggacgccaccctgatccaccagagcatcaccggcctgtacgagacccggatcgacctgagccagctgggcggcgacggcggcggcagccccaagaagaagcggaaggtgtga

SEQ ID NO: 83 - DNA, 4179 bp, synthetic construct
  misc_feature 1..4179: note = Synthetic
  source 1..4179: mol_type = other DNA
atggacaagaagtacagcatcggcctggccatcggcaccaacagcgtgggctgggccgtgatcaccgacgagtacaaggtgcccagcaagaagttcaaggtgctgggcaacaccgaccggcacagcatcaagaagaacctgatcggcgccctgctgttcgacagcggcgagaccgccgaggccacccggctgaagcggaccgcccggcggcggtacacccggcggaagaaccggatctgctacctgcaggagatcttcagcaacgagatggccaaggtggacgacagcttcttccaccggctggaggagagcttcctggtggaggaggacaagaagcacgagcggcaccccatcttcggcaacatcgtggacgaggtggcctaccacgagaagtaccccaccatctaccacctgcggaagaagctggtggacagcaccgacaaggccgacctgcggctgatctacctggccctggcccacatgatcaagttccggggccacttcctgatcgagggcgacctgaaccccgacaacagcgacgtggacaagctgttcatccagctggtgcagacctacaaccagctgttcgaggagaaccccatcaacgccagcggcgtggacgccaaggccatcctgagcgcccggctgagcaagagccggcggctggagaacctgatcgcccagctgcccggcgagaagaagaacggcctgttcggcaacctgatcgccctgagcctgggcctgacccccaacttcaagagcaacttcgacctggccgaggacgccaagctgcagctgagcaaggacacctacgacgacgacctggacaacctgctggcccagatcggcgaccagtacgccgacctgttcctggccgccaagaacctgagcgacgccatcctgctgagcgacatcctgcgggtgaacaccgagatcaccaaggcccccctgagcgccagcatgatcaagcggtacgacgagcaccaccaggacctgaccctgctgaaggccctggtgcggcagcagctgcccgagaagtacaaggagatcttcttcgaccagagcaagaacggctacgccggctacatcgacggcggcgccagccaggaggagttctacaagttcatcaagcccatcctggagaagatggacggcaccgaggagctgctggtgaagctgaaccgggaggacctgctgcggaagcagcggaccttcgacaacggcagcatcccccaccagatccacctgggcgagctgcacgccatcctgcggcggcaggaggacttctaccccttcctgaaggacaaccgggagaagatcgagaagatcctgaccttccggatcccctactacgtgggccccctggcccggggcaacagccggttcgcctggatgacccggaagagcgaggagaccatcaccccctggaacttcgaggaggtggtggacaagggcgccagcgcccagagcttcatcgagcggatgaccaacttcgacaagaacctgcccaacgagaaggtgctgcccaagcacagcctgctgtacgagtacttcaccgtgtacaacgagctgaccaaggtgaagtacgtgaccgagggcatgcggaagcccgccttcctgagcggcgagcagaagaaggccatcgtggacctgctgttcaagaccaaccggaaggtgaccgtgaagcagctgaaggaggactacttcaagaagatcgagtgcttcgacagcgtggagatcagcggcgtggaggaccggttcaacgccagcctgggcacctaccacgacctgctgaagatcatcaaggacaaggacttcctggacaacgaggagaacgaggacatcctggaggacatcgtgctgaccctgaccctgttcgaggaccgggagatgatcgaggagcggctgaagacctacgcccacctgttcgacgacaaggtgatgaagcagctgaagcggcggcggtacaccggctggggccggctgagccggaagctgatcaacggcatccgggacaagcagagcggcaagaccatcctggacttcctgaagagcgacggcttcgccaaccggaacttcatgcagctgatccacgacgacagcctgaccttcaaggaggacatccagaaggcccaggtgagcggccagggcgacagcctgcacgagcacatcgccaacctggccggcagccccgccatcaagaagggcatcctgcagaccgtgaaggtggtggacgagctggtgaaggtgatgggccggcacaagcccgagaacatcgtgatcgagatggcccgggagaaccagaccacccagaagggccagaagaacagccgggagcggatgaagcggatcgaggagggcatcaaggagctgggcagccagatcctgaaggagcaccccgtggagaacacccagctgcagaacgagaagctgtacctgtactacctgcagaacggccgggacatgtacgtggaccaggagctggacatcaaccggctgagcgactacgacgtggaccacatcgtgccccagagcttcctgaaggacgacagcatcgacaacaaggtgctgacccggagcgacaagaaccggggcaagagcgacaacgtgcccagcgaggaggtggtgaagaagatgaagaactactggcggcagctgctgaacgccaagctgatcacccagcggaagttcgacaacctgaccaaggccgagcggggcggcctgagcgagctggacaaggccggcttcatcaagcggcagctggtggagacccggcagatcaccaagcacgtggcccagatcctggacagccggatgaacaccaagtacgacgagaacgacaagctgatccgggaggtgaaggtgatcaccctgaagagcaagctggtgagcgacttccggaaggacttccagttctacaaggtgcgggagatcaacaactaccaccacgcccacgacgcctacctgaacgccgtggtgggcaccgccctgatcaagaagtaccccaagctggagagcgagttcgtgtacggcgactacaaggtgtacgacgtgcggaagatgatcgccaagagcgagcaggagatcggcaaggccaccgccaagtacttcttctacagcaacatcatgaacttcttcaagaccgagatcaccctggccaacggcgagatccggaagcggcccctgatcgagaccaacggcgagaccggcgagatcgtgtgggacaagggccgggacttcgccaccgtgcggaaggtgctgagcatgccccaggtgaacatcgtgaagaagaccgaggtgcagaccggcggcttcagcaaggagagcatcctgcccaagcggaacagcgacaagctgatcgcccggaagaaggactgggaccccaagaagtacggcggcttcgacagccccaccgtggcctacagcgtgctggtggtggccaaggtggagaagggcaagagcaagaagctgaagagcgtgaaggagctgctgggcatcaccatcatggagcggagcagcttcgagaagaaccccatcgacttcctggaggccaagggctacaaggaggtgaagaaggacctgatcatcaagctgcccaagtacagcctgttcgagctggagaacggccggaagcggatgctggccagcgccggcgagctgcagaagggcaacgagctggccctgcccagcaagtacgtgaacttcctgtacctggccagccactacgagaagctgaagggcagccccgaggacaacgagcagaagcagctgttcgtggagcagcacaagcactacctggacgagatcatcgagcagatcagcgagttcagcaagcgggtgatcctggccgacgccaacctggacaaggtgctgagcgcctacaacaagcaccgggacaagcccatccgggagcaggccgagaacatcatccacctgttcaccctgaccaacctgggcgcccccgccgccttcaagtacttcgacaccaccatcgaccggaagcggtacaccagcaccaaggaggtgctggacgccaccctgatccaccagagcatcaccggcctgtacgagacccggatcgacctgagccagctgggcggcgacggcagcggcagccccaagaagaagcggaaggtggacggcagccccaagaagaagcggaaggtggacagcggctga

SEQ ID NO: 84 - DNA, 4107 bp, synthetic construct
  misc_feature 1..4107: note = Synthetic
  source 1..4107: mol_type = other DNA
atggacaagaagtacagcatcggcctggccatcggcaccaacagcgtgggctgggccgtgatcaccgacgagtacaaggtgcccagcaagaagttcaaggtgctgggcaacaccgaccggcacagcatcaagaagaacctgatcggcgccctgctgttcgacagcggcgagaccgccgaggccacccggctgaagcggaccgcccggcggcggtacacccggcggaagaaccggatctgctacctgcaggagatcttcagcaacgagatggccaaggtggacgacagcttcttccaccggctggaggagagcttcctggtggaggaggacaagaagcacgagcggcaccccatcttcggcaacatcgtggacgaggtggcctaccacgagaagtaccccaccatctaccacctgcggaagaagctggtggacagcaccgacaaggccgacctgcggctgatctacctggccctggcccacatgatcaagttccggggccacttcctgatcgagggcgacctgaaccccgacaacagcgacgtggacaagctgttcatccagctggtgcagacctacaaccagctgttcgaggagaaccccatcaacgccagcggcgtggacgccaaggccatcctgagcgcccggctgagcaagagccggcggctggagaacctgatcgcccagctgcccggcgagaagaagaacggcctgttcggcaacctgatcgccctgagcctgggcctgacccccaacttcaagagcaacttcgacctggccgaggacgccaagctgcagctgagcaaggacacctacgacgacgacctggacaacctgctggcccagatcggcgaccagtacgccgacctgttcctggccgccaagaacctgagcgacgccatcctgctgagcgacatcctgcgggtgaacaccgagatcaccaaggcccccctgagcgccagcatgatcaagcggtacgacgagcaccaccaggacctgaccctgctgaaggccctggtgcggcagcagctgcccgagaagtacaaggagatcttcttcgaccagagcaagaacggctacgccggctacatcgacggcggcgccagccaggaggagttctacaagttcatcaagcccatcctggagaagatggacggcaccgaggagctgctggtgaagctgaaccgggaggacctgctgcggaagcagcggaccttcgacaacggcagcatcccccaccagatccacctgggcgagctgcacgccatcctgcggcggcaggaggacttctaccccttcctgaaggacaaccgggagaagatcgagaagatcctgaccttccggatcccctactacgtgggccccctggcccggggcaacagccggttcgcctggatgacccggaagagcgaggagaccatcaccccctggaacttcgaggaggtggtggacaagggcgccagcgcccagagcttcatcgagcggatgaccaacttcgacaagaacctgcccaacgagaaggtgctgcccaagcacagcctgctgtacgagtacttcaccgtgtacaacgagctgaccaaggtgaagtacgtgaccgagggcatgcggaagcccgccttcctgagcggcgagcagaagaaggccatcgtggacctgctgttcaagaccaaccggaaggtgaccgtgaagcagctgaaggaggactacttcaagaagatcgagtgcttcgacagcgtggagatcagcggcgtggaggaccggttcaacgccagcctgggcacctaccacgacctgctgaagatcatcaaggacaaggacttcctggacaacgaggagaacgaggacatcctggaggacatcgtgctgaccctgaccctgttcgaggaccgggagatgatcgaggagcggctgaagacctacgcccacctgttcgacgacaaggtgatgaagcagctgaagcggcggcggtacaccggctggggccggctgagccggaagctgatcaacggcatccgggacaagcagagcggcaagaccatcctggacttcctgaagagcgacggcttcgccaaccggaacttcatgcagctgatccacgacgacagcctgaccttcaaggaggacatccagaaggcccaggtgagcggccagggcgacagcctgcacgagcacatcgccaacctggccggcagccccgccatcaagaagggcatcctgcagaccgtgaaggtggtggacgagctggtgaaggtgatgggccggcacaagcccgagaacatcgtgatcgagatggcccgggagaaccagaccacccagaagggccagaagaacagccgggagcggatgaagcggatcgaggagggcatcaaggagctgggcagccagatcctgaaggagcaccccgtggagaacacccagctgcagaacgagaagctgtacctgtactacctgcagaacggccgggacatgtacgtggaccaggagctggacatcaaccggctgagcgactacgacgtggaccacatcgtgccccagagcttcctgaaggacgacagcatcgacaacaaggtgctgacccggagcgacaagaaccggggcaagagcgacaacgtgcccagcgaggaggtggtgaagaagatgaagaactactggcggcagctgctgaacgccaagctgatcacccagcggaagttcgacaacctgaccaaggccgagcggggcggcctgagcgagctggacaaggccggcttcatcaagcggcagctggtggagacccggcagatcaccaagcacgtggcccagatcctggacagccggatgaacaccaagtacgacgagaacgacaagctgatccgggaggtgaaggtgatcaccctgaagagcaagctggtgagcgacttccggaaggacttccagttctacaaggtgcgggagatcaacaactaccaccacgcccacgacgcctacctgaacgccgtggtgggcaccgccctgatcaagaagtaccccaagctggagagcgagttcgtgtacggcgactacaaggtgtacgacgtgcggaagatgatcgccaagagcgagcaggagatcggcaaggccaccgccaagtacttcttctacagcaacatcatgaacttcttcaagaccgagatcaccctggccaacggcgagatccggaagcggcccctgatcgagaccaacggcgagaccggcgagatcgtgtgggacaagggccgggacttcgccaccgtgcggaaggtgctgagcatgccccaggtgaacatcgtgaagaagaccgaggtgcagaccggcggcttcagcaaggagagcatcctgcccaagcggaacagcgacaagctgatcgcccggaagaaggactgggaccccaagaagtacggcggcttcgacagccccaccgtggcctacagcgtgctggtggtggccaaggtggagaagggcaagagcaagaagctgaagagcgtgaaggagctgctgggcatcaccatcatggagcggagcagcttcgagaagaaccccatcgacttcctggaggccaagggctacaaggaggtgaagaaggacctgatcatcaagctgcccaagtacagcctgttcgagctggagaacggccggaagcggatgctggccagcgccggcgagctgcagaagggcaacgagctggccctgcccagcaagtacgtgaacttcctgtacctggccagccactacgagaagctgaagggcagccccgaggacaacgagcagaagcagctgttcgtggagcagcacaagcactacctggacgagatcatcgagcagatcagcgagttcagcaagcgggtgatcctggccgacgccaacctggacaaggtgctgagcgcctacaacaagcaccgggacaagcccatccgggagcaggccgagaacatcatccacctgttcaccctgaccaacctgggcgcccccgccgccttcaagtacttcgacaccaccatcgaccggaagcggtacaccagcaccaaggaggtgctggacgccaccctgatccaccagagcatcaccggcctgtacgagacccggatcgacctgagccagctgggcggcgactga

SEQ ID NO: 85 - DNA, 4134 bp, synthetic construct
  misc_feature 1..4134: note = Synthetic
  source 1..4134: mol_type = other DNA
gacaagaagtactccatcggcctggccatcggcaccaactccgtgggctgggccgtgatcaccgacgagtacaaggtgccctccaagaagttcaaggtgctgggcaacaccgaccggcactccatcaagaagaacctgatcggcgccctgctgttcgactccggcgagaccgccgaggccacccggctgaagcggaccgcccggcggcggtacacccggcggaagaaccggatctgctacctgcaggagatcttctccaacgagatggccaaggtggacgactccttcttccaccggctggaggagtccttcctggtggaggaggacaagaagcacgagcggcaccccatcttcggcaacatcgtggacgaggtggcctaccacgagaagtaccccaccatctaccacctgcggaagaagctggtggactccaccgacaaggccgacctgcggctgatctacctggccctggcccacatgatcaagttccggggccacttcctgatcgagggcgacctgaaccccgacaactccgacgtggacaagctgttcatccagctggtgcagacctacaaccagctgttcgaggagaaccccatcaacgcctccggcgtggacgccaaggccatcctgtccgcccggctgtccaagtcccggcggctggagaacctgatcgcccagctgcccggcgagaagaagaacggcctgttcggcaacctgatcgccctgtccctgggcctgacccccaacttcaagtccaacttcgacctggccgaggacgccaagctgcagctgtccaaggacacctacgacgacgacctggacaacctgctggcccagatcggcgaccagtacgccgacctgttcctggccgccaagaacctgtccgacgccatcctgctgtccgacatcctgcgggtgaacaccgagatcaccaaggcccccctgtccgcctccatgatcaagcggtacgacgagcaccaccaggacctgaccctgctgaaggccctggtgcggcagcagctgcccgagaagtacaaggagatcttcttcgaccagtccaagaacggctacgccggctacatcgacggcggcgcctcccaggaggagttctacaagttcatcaagcccatcctggagaagatggacggcaccgaggagctgctggtgaagctgaaccgggaggacctgctgcggaagcagcggaccttcgacaacggctccatcccccaccagatccacctgggcgagctgcacgccatcctgcggcggcaggaggacttctaccccttcctgaaggacaaccgggagaagatcgagaagatcctgaccttccggatcccctactacgtgggccccctggcccggggcaactcccggttcgcctggatgacccggaagtccgaggagaccatcaccccctggaacttcgaggaggtggtggacaagggcgcctccgcccagtccttcatcgagcggatgaccaacttcgacaagaacctgcccaacgagaaggtgctgcccaagcactccctgctgtacgagtacttcaccgtgtacaacgagctgaccaaggtgaagtacgtgaccgagggcatgcggaagcccgccttcctgtccggcgagcagaagaaggccatcgtggacctgctgttcaagaccaaccggaaggtgaccgtgaagcagctgaaggaggactacttcaagaagatcgagtgcttcgactccgtggagatctccggcgtggaggaccggttcaacgcctccctgggcacctaccacgacctgctgaagatcatcaaggacaaggacttcctggacaacgaggagaacgaggacatcctggaggacatcgtgctgaccctgaccctgttcgaggaccgggagatgatcgaggagcggctgaagacctacgcccacctgttcgacgacaaggtgatgaagcagctgaagcggcggcggtacaccggctggggccggctgtcccggaagctgatcaacggcatccgggacaagcagtccggcaagaccatcctggacttcctgaagtccgacggcttcgccaaccggaacttcatgcagctgatccacgacgactccctgaccttcaaggaggacatccagaaggcccaggtgtccggccagggcgactccctgcacgagcacatcgccaacctggccggctcccccgccatcaagaagggcatcctgcagaccgtgaaggtggtggacgagctggtgaaggtgatgggccggcacaagcccgagaacatcgtgatcgagatggcccgggagaaccagaccacccagaagggccagaagaactcccgggagcggatgaagcggatcgaggagggcatcaaggagctgggctcccagatcctgaaggagcaccccgtggagaacacccagctgcagaacgagaagctgtacctgtactacctgcagaacggccgggacatgtacgtggaccaggagctggacatcaaccggctgtccgactacgacgtggaccacatcgtgccccagtccttcctgaaggacgactccatcgacaacaaggtgctgacccggtccgacaagaaccggggcaagtccgacaacgtgccctccgaggaggtggtgaagaagatgaagaactactggcggcagctgctgaacgccaagctgatcacccagcggaagttcgacaacctgaccaaggccgagcggggcggcctgtccgagctggacaaggccggcttcatcaagcggcagctggtggagacccggcagatcaccaagcacgtggcccagatcctggactcccggatgaacaccaagtacgacgagaacgacaagctgatccgggaggtgaaggtgatcaccctgaagtccaagctggtgtccgacttccggaaggacttccagttctacaaggtgcgggagatcaacaactaccaccacgcccacgacgcctacctgaacgccgtggtgggcaccgccctgatcaagaagtaccccaagctggagtccgagttcgtgtacggcgactacaaggtgtacgacgtgcggaagatgatcgccaagtccgagcaggagatcggcaaggccaccgccaagtacttcttctactccaacatcatgaacttcttcaagaccgagatcaccctggccaacggcgagatccggaagcggcccctgatcgagaccaacggcgagaccggcgagatcgtgtgggacaagggccgggacttcgccaccgtgcggaaggtgctgtccatgccccaggtgaacatcgtgaagaagaccgaggtgcagaccggcggcttctccaaggagtccatcctgcccaagcggaactccgacaagctgatcgcccggaagaaggactgggaccccaagaagtacggcggcttcgactcccccaccgtggcctactccgtgctggtggtggccaaggtggagaagggcaagtccaagaagctgaagtccgtgaaggagctgctgggcatcaccatcatggagcggtcctccttcgagaagaaccccatcgacttcctggaggccaagggctacaaggaggtgaagaaggacctgatcatcaagctgcccaagtactccctgttcgagctggagaacggccggaagcggatgctggcctccgccggcgagctgcagaagggcaacgagctggccctgccctccaagtacgtgaacttcctgtacctggcctcccactacgagaagctgaagggctcccccgaggacaacgagcagaagcagctgttcgtggagcagcacaagcactacctggacgagatcatcgagcagatctccgagttctccaagcgggtgatcctggccgacgccaacctggacaaggtgctgtccgcctacaacaagcaccgggacaagcccatccgggagcaggccgagaacatcatccacctgttcaccctgaccaacctgggcgcccccgccgccttcaagtacttcgacaccaccatcgaccggaagcggtacacctccaccaaggaggtgctggacgccaccctgatccaccagtccatcaccggcctgtacgagacccggatcgacctgtcccagctgggcggcgacggcggcggctcccccaagaagaagcggaaggtg

SEQ ID NO: 86 - DNA, 4101 bp, synthetic construct
  misc_feature 1..4101: note = Synthetic
  source 1..4101: mol_type = other DNA
gacaagaagtactccatcggcctggccatcggcaccaactccgtgggctgggccgtgatcaccgacgagtacaaggtgccctccaagaagttcaaggtgctgggcaacaccgaccggcactccatcaagaagaacctgatcggcgccctgctgttcgactccggcgagaccgccgaggccacccggctgaagcggaccgcccggcggcggtacacccggcggaagaaccggatctgctacctgcaggagatcttctccaacgagatggccaaggtggacgactccttcttccaccggctggaggagtccttcctggtggaggaggacaagaagcacgagcggcaccccatcttcggcaacatcgtggacgaggtggcctaccacgagaagtaccccaccatctaccacctgcggaagaagctggtggactccaccgacaaggccgacctgcggctgatctacctggccctggcccacatgatcaagttccggggccacttcctgatcgagggcgacctgaaccccgacaactccgacgtggacaagctgttcatccagctggtgcagacctacaaccagctgttcgaggagaaccccatcaacgcctccggcgtggacgccaaggccatcctgtccgcccggctgtccaagtcccggcggctggagaacctgatcgcccagctgcccggcgagaagaagaacggcctgttcggcaacctgatcgccctgtccctgggcctgacccccaacttcaagtccaacttcgacctggccgaggacgccaagctgcagctgtccaaggacacctacgacgacgacctggacaacctgctggcccagatcggcgaccagtacgccgacctgttcctggccgccaagaacctgtccgacgccatcctgctgtccgacatcctgcgggtgaacaccgagatcaccaaggcccccctgtccgcctccatgatcaagcggtacgacgagcaccaccaggacctgaccctgctgaaggccctggtgcggcagcagctgcccgagaagtacaaggagatcttcttcgaccagtccaagaacggctacgccggctacatcgacggcggcgcctcccaggaggagttctacaagttcatcaagcccatcctggagaagatggacggcaccgaggagctgctggtgaagctgaaccgggaggacctgctgcggaagcagcggaccttcgacaacggctccatcccccaccagatccacctgggcgagctgcacgccatcctgcggcggcaggaggacttctaccccttcctgaaggacaaccgggagaagatcgagaagatcctgaccttccggatcccctactacgtgggccccctggcccggggcaactcccggttcgcctggatgacccggaagtccgaggagaccatcaccccctggaacttcgaggaggtggtggacaagggcgcctccgcccagtccttcatcgagcggatgaccaacttcgacaagaacctgcccaacgagaaggtgctgcccaagcactccctgctgtacgagtacttcaccgtgtacaacgagctgaccaaggtgaagtacgtgaccgagggcatgcggaagcccgccttcctgtccggcgagcagaagaaggccatcgtggacctgctgttcaagaccaaccggaaggtgaccgtgaagcagctgaaggaggactacttcaagaagatcgagtgcttcgactccgtggagatctccggcgtggaggaccggttcaacgcctccctgggcacctaccacgacctgctgaagatcatcaaggacaaggacttcctggacaacgaggagaacgaggacatcctggaggacatcgtgctgaccctgaccctgttcgaggaccgggagatgatcgaggagcggctgaagacctacgcccacctgttcgacgacaaggtgatgaagcagctgaagcggcggcggtacaccggctggggccggctgtcccggaagctgatcaacggcatccgggacaagcagtccggcaagaccatcctggacttcctgaagtccgacggcttcgccaaccggaacttcatgcagctgatccacgacgactccctgaccttcaaggaggacatccagaaggcccaggtgtccggccagggcgactccctgcacgagcacatcgccaacctggccggctcccccgccatcaagaagggcatcctgcagaccgtgaaggtggtggacgagctggtgaaggtgatgggccggcacaagcccgagaacatcgtgatcgagatggcccgggagaaccagaccacccagaagggccagaagaactcccgggagcggatgaagcggatcgaggagggcatcaaggagctgggctcccagatcctgaaggagcaccccgtggagaacacccagctgcagaacgagaagctgtacctgtactacctgcagaacggccgggacatgtacgtggaccaggagctggacatcaaccggctgtccgactacgacgtggaccacatcgtgccccagtccttcctgaaggacgactccatcgacaacaaggtgctgacccggtccgacaagaaccggggcaagtccgacaacgtgccctccgaggaggtggtgaagaagatgaagaactactggcggcagctgctgaacgccaagctgatcacccagcggaagttcgacaacctgaccaaggccgagcggggcggcctgtccgagctggacaaggccggcttcatcaagcggcagctggtggagacccggcagatcaccaagcacgtggcccagatcctggactcccggatgaacaccaagtacgacgagaacgacaagctgatccgggaggtgaaggtgatcaccctgaagtccaagctggtgtccgacttccggaaggacttccagttctacaaggtgcgggagatcaacaactaccaccacgcccacgacgcctacctgaacgccgtggtgggcaccgccctgatcaagaagtaccccaagctggagtccgagttcgtgtacggcgactacaaggtgtacgacgtgcggaagatgatcgccaagtccgagcaggagatcggcaaggccaccgccaagtacttcttctactccaacatcatgaacttcttcaagaccgagatcaccctggccaacggcgagatccggaagcggcccctgatcgagaccaacggcgagaccggcgagatcgtgtgggacaagggccgggacttcgccaccgtgcggaaggtgctgtccatgccccaggtgaacatcgtgaagaagaccgaggtgcagaccggcggcttctccaaggagtccatcctgcccaagcggaactccgacaagctgatcgcccggaagaaggactgggaccccaagaagtacggcggcttcgactcccccaccgtggcctactccgtgctggtggtggccaaggtggagaagggcaagtccaagaagctgaagtccgtgaaggagctgctgggcatcaccatcatggagcggtcctccttcgagaagaaccccatcgacttcctggaggccaagggctacaaggaggtgaagaaggacctgatcatcaagctgcccaagtactccctgttcgagctggagaacggccggaagcggatgctggcctccgccggcgagctgcagaagggcaacgagctggccctgccctccaagtacgtgaacttcctgtacctggcctcccactacgagaagctgaagggctcccccgaggacaacgagcagaagcagctgttcgtggagcagcacaagcactacctggacgagatcatcgagcagatctccgagttctccaagcgggtgatcctggccgacgccaacctggacaaggtgctgtccgcctacaacaagcaccgggacaagcccatccgggagcaggccgagaacatcatccacctgttcaccctgaccaacctgggcgcccccgccgccttcaagtacttcgacaccaccatcgaccggaagcggtacacctccaccaaggaggtgctggacgccaccctgatccaccagtccatcaccggcctgtacgagacccggatcgacctgtcccagctgggcggcgac

SEQ ID NO: 87 - DNA, 4173 bp, synthetic construct
  misc_feature 1..4173: note = Synthetic
  source 1..4173: mol_type = other DNA
gacaagaagtactccatcggcctggccatcggcaccaactccgtgggctgggccgtgatcaccgacgagtacaaggtgccctccaagaagttcaaggtgctgggcaacaccgaccggcactccatcaagaagaacctgatcggcgccctgctgttcgactccggcgagaccgccgaggccacccggctgaagcggaccgcccggcggcggtacacccggcggaagaaccggatctgctacctgcaggagatcttctccaacgagatggccaaggtggacgactccttcttccaccggctggaggagtccttcctggtggaggaggacaagaagcacgagcggcaccccatcttcggcaacatcgtggacgaggtggcctaccacgagaagtaccccaccatctaccacctgcggaagaagctggtggactccaccgacaaggccgacctgcggctgatctacctggccctggcccacatgatcaagttccggggccacttcctgatcgagggcgacctgaaccccgacaactccgacgtggacaagctgttcatccagctggtgcagacctacaaccagctgttcgaggagaaccccatcaacgcctccggcgtggacgccaaggccatcctgtccgcccggctgtccaagtcccggcggctggagaacctgatcgcccagctgcccggcgagaagaagaacggcctgttcggcaacctgatcgccctgtccctgggcctgacccccaacttcaagtccaacttcgacctggccgaggacgccaagctgcagctgtccaaggacacctacgacgacgacctggacaacctgctggcccagatcggcgaccagtacgccgacctgttcctggccgccaagaacctgtccgacgccatcctgctgtccgacatcctgcgggtgaacaccgagatcaccaaggcccccctgtccgcctccatgatcaagcggtacgacgagcaccaccaggacctgaccctgctgaaggccctggtgcggcagcagctgcccgagaagtacaaggagatcttcttcgaccagtccaagaacggctacgccggctacatcgacggcggcgcctcccaggaggagttctacaagttcatcaagcccatcctggagaagatggacggcaccgaggagctgctggtgaagctgaaccgggaggacctgctgcggaagcagcggaccttcgacaacggctccatcccccaccagatccacctgggcgagctgcacgccatcctgcggcggcaggaggacttctaccccttcctgaaggacaaccgggagaagatcgagaagatcctgaccttccggatcccctactacgtgggccccctggcccggggcaactcccggttcgcctggatgacccggaagtccgaggagaccatcaccccctggaacttcgaggaggtggtggacaagggcgcctccgcccagtccttcatcgagcggatgaccaacttcgacaagaacctgcccaacgagaaggtgctgcccaagcactccctgctgtacgagtacttcaccgtgtacaacgagctgaccaaggtgaagtacgtgaccgagggcatgcggaagcccgccttcctgtccggcgagcagaagaaggccatcgtggacctgctgttcaagaccaaccggaaggtgaccgtgaagcagctgaaggaggactacttcaagaagatcgagtgcttcgactccgtggagatctccggcgtggaggaccggttcaacgcctccctgggcacctaccacgacctgctgaagatcatcaaggacaaggacttcctggacaacgaggagaacgaggacatcctggaggacatcgtgctgaccctgaccctgttcgaggaccgggagatgatcgaggagcggctgaagacctacgcccacctgttcgacgacaaggtgatgaagcagctgaagcggcggcggtacaccggctggggccggctgtcccggaagctgatcaacggcatccgggacaagcagtccggcaagaccatcctggacttcctgaagtccgacggcttcgccaaccggaacttcatgcagctgatccacgacgactccctgaccttcaaggaggacatccagaaggcccaggtgtccggccagggcgactccctgcacgagcacatcgccaacctggccggctcccccgccatcaagaagggcatcctgcagaccgtgaaggtggtggacgagctggtgaaggtgatgggccggcacaagcccgagaacatcgtgatcgagatggcccgggagaaccagaccacccagaagggccagaagaactcccgggagcggatgaagcggatcgaggagggcatcaaggagctgggctcccagatcctgaaggagcaccccgtggagaacacccagctgcagaacgagaagctgtacctgtactacctgcagaacggccgggacatgtacgtggaccaggagctggacatcaaccggctgtccgactacgacgtggaccacatcgtgccccagtccttcctgaaggacgactccatcgacaacaaggtgctgacccggtccgacaagaaccggggcaagtccgacaacgtgccctccgaggaggtggtgaagaagatgaagaactactggcggcagctgctgaacgccaagctgatcacccagcggaagttcgacaacctgaccaaggccgagcggggcggcctgtccgagctggacaaggccggcttcatcaagcggcagctggtggagacccggcagatcaccaagcacgtggcccagatcctggactcccggatgaacaccaagtacgacgagaacgacaagctgatccgggaggtgaaggtgatcaccctgaagtccaagctggtgtccgacttccggaaggacttccagttctacaaggtgcgggagatcaacaactaccaccacgcccacgacgcctacctgaacgccgtggtgggcaccgccctgatcaagaagtaccccaagctggagtccgagttcgtgtacggcgactacaaggtgtacgacgtgcggaagatgatcgccaagtccgagcaggagatcggcaaggccaccgccaagtacttcttctactccaacatcatgaacttcttcaagaccgagatcaccctggccaacggcgagatccggaagcggcccctgatcgagaccaacggcgagaccggcgagatcgtgtgggacaagggccgggacttcgccaccgtgcggaaggtgctgtccatgccccaggtgaacatcgtgaagaagaccgaggtgcagaccggcggcttctccaaggagtccatcctgcccaagcggaactccgacaagctgatcgcccggaagaaggactgggaccccaagaagtacggcggcttcgactcccccaccgtggcctactccgtgctggtggtggccaaggtggagaagggcaagtccaagaagctgaagtccgtgaaggagctgctgggcatcaccatcatggagcggtcctccttcgagaagaaccccatcgacttcctggaggccaagggctacaaggaggtgaagaaggacctgatcatcaagctgcccaagtactccctgttcgagctggagaacggccggaagcggatgctggcctccgccggcgagctgcagaagggcaacgagctggccctgccctccaagtacgtgaacttcctgtacctggcctcccactacgagaagctgaagggctcccccgaggacaacgagcagaagcagctgttcgtggagcagcacaagcactacctggacgagatcatcgagcagatctccgagttctccaagcgggtgatcctggccgacgccaacctggacaaggtgctgtccgcctacaacaagcaccgggacaagcccatccgggagcaggccgagaacatcatccacctgttcaccctgaccaacctgggcgcccccgccgccttcaagtacttcgacaccaccatcgaccggaagcggtacacctccaccaaggaggtgctggacgccaccctgatccaccagtccatcaccggcctgtacgagacccggatcgacctgtcccagctgggcggcgacggctccggctcccccaagaagaagcggaaggtggacggctcccccaagaagaagcggaaggtggactccggc

SEQ ID NO: 88 - DNA, 4134 bp, synthetic construct
  misc_feature 1..4134: note = Synthetic
  source 1..4134: mol_type = other DNA
gacaagaagtacagcatcggcctggccatcggcaccaacagcgtgggctgggccgtgatcaccgacgagtacaaggtgcccagcaagaagttcaaggtgctgggcaacaccgaccggcacagcatcaagaagaacctgatcggcgccctgctgttcgacagcggcgagaccgccgaggccacccggctgaagcggaccgcccggcggcggtacacccggcggaagaaccggatctgctacctgcaggagatcttcagcaacgagatggccaaggtggacgacagcttcttccaccggctggaggagagcttcctggtggaggaggacaagaagcacgagcggcaccccatcttcggcaacatcgtggacgaggtggcctaccacgagaagtaccccaccatctaccacctgcggaagaagctggtggacagcaccgacaaggccgacctgcggctgatctacctggccctggcccacatgatcaagttccggggccacttcctgatcgagggcgacctgaaccccgacaacagcgacgtggacaagctgttcatccagctggtgcagacctacaaccagctgttcgaggagaaccccatcaacgccagcggcgtggacgccaaggccatcctgagcgcccggctgagcaagagccggcggctggagaacctgatcgcccagctgcccggcgagaagaagaacggcctgttcggcaacctgatcgccctgagcctgggcctgacccccaacttcaagagcaacttcgacctggccgaggacgccaagctgcagctgagcaaggacacctacgacgacgacctggacaacctgctggcccagatcggcgaccagtacgccgacctgttcctggccgccaagaacctgagcgacgccatcctgctgagcgacatcctgcgggtgaacaccgagatcaccaaggcccccctgagcgccagcatgatcaagcggtacgacgagcaccaccaggacctgaccctgctgaaggccctggtgcggcagcagctgcccgagaagtacaaggagatcttcttcgaccagagcaagaacggctacgccggctacatcgacggcggcgccagccaggaggagttctacaagttcatcaagcccatcctggagaagatggacggcaccgaggagctgctggtgaagctgaaccgggaggacctgctgcggaagcagcggaccttcgacaacggcagcatcccccaccagatccacctgggcgagctgcacgccatcctgcggcggcaggaggacttctaccccttcctgaaggacaaccgggagaagatcgagaagatcctgaccttccggatcccctactacgtgggccccctggcccggggcaacagccggttcgcctggatgacccggaagagcgaggagaccatcaccccctggaacttcgaggaggtggtggacaagggcgccagcgcccagagcttcatcgagcggatgaccaacttcgacaagaacctgcccaacgagaaggtgctgcccaagcacagcctgctgtacgagtacttcaccgtgtacaacgagctgaccaaggtgaagtacgtgaccgagggcatgcggaagcccgccttcctgagcggcgagcagaagaaggccatcgtggacctgctgttcaagaccaaccggaaggtgaccgtgaagcagctgaaggaggactacttcaagaagatcgagtgcttcgacagcgtggagatcagcggcgtggaggaccggttcaacgccagcctgggcacctaccacgacctgctgaagatcatcaaggacaaggacttcctggacaacgaggagaacgaggacatcctggaggacatcgtgctgaccctgaccctgttcgaggaccgggagatgatcgaggagcggctgaagacctacgcccacctgttcgacgacaaggtgatgaagcagctgaagcggcggcggtacaccggctggggccggctgagccggaagctgatcaacggcatccgggacaagcagagcggcaagaccatcctggacttcctgaagagcgacggcttcgccaaccggaacttcatgcagctgatccacgacgacagcctgaccttcaaggaggacatccagaaggcccaggtgagcggccagggcgacagcctgcacgagcacatcgccaacctggccggcagccccgccatcaagaagggcatcctgcagaccgtgaaggtggtggacgagctggtgaaggtgatgggccggcacaagcccgagaacatcgtgatcgagatggcccgggagaaccagaccacccagaagggccagaagaacagccgggagcggatgaagcggatcgaggagggcatcaaggagctgggcagccagatcctgaaggagcaccccgtggagaacacccagctgcagaacgagaagctgtacctgtactacctgcagaacggccgggacatgtacgtggaccaggagctggacatcaaccggctgagcgactacgacgtggaccacatcgtgccccagagcttcctgaaggacgacagcatcgacaacaaggtgctgacccggagcgacaagaaccggggcaagagcgacaacgtgcccagcgaggaggtggtgaagaagatgaagaactactggcggcagctgctgaacgccaagctgatcacccagcggaagttcgacaacctgaccaaggccgagcggggcggcctgagcgagctggacaaggccggcttcatcaagcggcagctggtggagacccggcagatcaccaagcacgtggcccagatcctggacagccggatgaacaccaagtacgacgagaacgacaagctgatccgggaggtgaaggtgatcaccctgaagagcaagctggtgagcgacttccggaaggacttccagttctacaaggtgcgggagatcaacaactaccaccacgcccacgacgcctacctgaacgccgtggtgggcaccgccctgatcaagaagtaccccaagctggagagcgagttcgtgtacggcgactacaaggtgtacgacgtgcggaagatgatcgccaagagcgagcaggagatcggcaaggccaccgccaagtacttcttctacagcaacatcatgaacttcttcaagaccgagatcaccctggccaacggcgagatccggaagcggcccctgatcgagaccaacggcgagaccggcgagatcgtgtgggacaagggccgggacttcgccaccgtgcggaaggtgctgagcatgccccaggtgaacatcgtgaagaagaccgaggtgcagaccggcggcttcagcaaggagagcatcctgcccaagcggaacagcgacaagctgatcgcccggaagaaggactgggaccccaagaagtacggcggcttcgacagccccaccgtggcctacagcgtgctggtggtggccaaggtggagaagggcaagagcaagaagctgaagagcgtgaaggagctgctgggcatcaccatcatggagcggagcagcttcgagaagaaccccatcgacttcctggaggccaagggctacaaggaggtgaagaaggacctgatcatcaagctgcccaagtacagcctgttcgagctggagaacggccggaagcggatgctggccagcgccggcgagctgcagaagggcaacgagctggccctgcccagcaagtacgtgaacttcctgtacctggccagccactacgagaagctgaagggcagccccgaggacaacgagcagaagcagctgttcgtggagcagcacaagcactacctggacgagatcatcgagcagatcagcgagttcagcaagcgggtgatcctggccgacgccaacctggacaaggtgctgagcgcctacaacaagcaccgggacaagcccatccgggagcaggccgagaacatcatccacctgttcaccctgaccaacctgggcgcccccgccgccttcaagtacttcgacaccaccatcgaccggaagcggtacaccagcaccaaggaggtgctggacgccaccctgatccaccagagcatcaccggcctgtacgagacccggatcgacctgagccagctgggcggcgacggcggcggcagccccaagaagaagcggaaggtg

SEQ ID NO: 89 - DNA, 4173 bp, synthetic construct
  misc_feature 1..4173: note = Synthetic
  source 1..4173: mol_type = other DNA
gacaagaagtacagcatcggcctggccatcggcaccaacagcgtgggctgggccgtgatcaccgacgagtacaaggtgcccagcaagaagttcaaggtgctgggcaacaccgaccggcacagcatcaagaagaacctgatcggcgccctgctgttcgacagcggcgagaccgccgaggccacccggctgaagcggaccgcccggcggcggtacacccggcggaagaaccggatctgctacctgcaggagatcttcagcaacgagatggccaaggtggacgacagcttcttccaccggctggaggagagcttcctggtggaggaggacaagaagcacgagcggcaccccatcttcggcaacatcgtggacgaggtggcctaccacgagaagtaccccaccatctaccacctgcggaagaagctggtggacagcaccgacaaggccgacctgcggctgatctacctggccctggcccacatgatcaagttccggggccacttcctgatcgagggcgacctgaaccccgacaacagcgacgtggacaagctgttcatccagctggtgcagacctacaaccagctgttcgaggagaaccccatcaacgccagcggcgtggacgccaaggccatcctgagcgcccggctgagcaagagccggcggctggagaacctgatcgcccagctgcccggcgagaagaagaacggcctgttcggcaacctgatcgccctgagcctgggcctgacccccaacttcaagagcaacttcgacctggccgaggacgccaagctgcagctgagcaaggacacctacgacgacgacctggacaacctgctggcccagatcggcgaccagtacgccgacctgttcctggccgccaagaacctgagcgacgccatcctgctgagcgacatcctgcgggtgaacaccgagatcaccaaggcccccctgagcgccagcatgatcaagcggtacgacgagcaccaccaggacctgaccctgctgaaggccctggtgcggcagcagctgcccgagaagtacaaggagatcttcttcgaccagagcaagaacggctacgccggctacatcgacggcggcgccagccaggaggagttctacaagttcatcaagcccatcctggagaagatggacggcaccgaggagctgctggtgaagctgaaccgggaggacctgctgcggaagcagcggaccttcgacaacggcagcatcccccaccagatccacctgggcgagctgcacgccatcctgcggcggcaggaggacttctaccccttcctgaaggacaaccgggagaagatcgagaagatcctgaccttccggatcccctactacgtgggccccctggcccggggcaacagccggttcgcctggatgacccggaagagcgaggagaccatcaccccctggaacttcgaggaggtggtggacaagggcgccagcgcccagagcttcatcgagcggatgaccaacttcgacaagaacctgcccaacgagaaggtgctgcccaagcacagcctgctgtacgagtacttcaccgtgtacaacgagctgaccaaggtgaagtacgtgaccgagggcatgcggaagcccgccttcctgagcggcgagcagaagaaggccatcgtggacctgctgttcaagaccaaccggaaggtgaccgtgaagcagctgaaggaggactacttcaagaagatcgagtgcttcgacagcgtggagatcagcggcgtggaggaccggttcaacgccagcctgggcacctaccacgacctgctgaagatcatcaaggacaaggacttcctggacaacgaggagaacgaggacatcctggaggacatcgtgctgaccctgaccctgttcgaggaccgggagatgatcgaggagcggctgaagacctacgcccacctgttcgacgacaaggtgatgaagcagctgaagcggcggcggtacaccggctggggccggctgagccggaagctgatcaacggcatccgggacaagcagagcggcaagaccatcctggacttcctgaagagcgacggcttcgccaaccggaacttcatgcagctgatccacgacgacagcctgaccttcaaggaggacatccagaaggcccaggtgagcggccagggcgacagcctgcacgagcacatcgccaacctggccggcagccccgccatcaagaagggcatcctgcagaccgtgaaggtggtggacgagctggtgaaggtgatgggccggcacaagcccgagaacatcgtgatcgagatggcccgggagaaccagaccacccagaagggccagaagaacagccgggagcggatgaagcggatcgaggagggcatcaaggagctgggcagccagatcctgaaggagcaccccgtggagaacacccagctgcagaacgagaagctgtacctgtactacctgcagaacggccgggacatgtacgtggaccaggagctggacatcaaccggctgagcgactacgacgtggaccacatcgtgccccagagcttcctgaaggacgacagcatcgacaacaaggtgctgacccggagcgacaagaaccggggcaagagcgacaacgtgcccagcgaggaggtggtgaagaagatgaagaactactggcggcagctgctgaacgccaagctgatcacccagcggaagttcgacaacctgaccaaggccgagcggggcggcctgagcgagctggacaaggccggcttcatcaagcggcagctggtggagacccggcagatcaccaagcacgtggcccagatcctggacagccggatgaacaccaagtacgacgagaacgacaagctgatccgggaggtgaaggtgatcaccctgaagagcaagctggtgagcgacttccggaaggacttccagttctacaaggtgcgggagatcaacaactaccaccacgcccacgacgcctacctgaacgccgtggtgggcaccgccctgatcaagaagtaccccaagctggagagcgagttcgtgtacggcgactacaaggtgtacgacgtgcggaagatgatcgccaagagcgagcaggagatcggcaaggccaccgccaagtacttcttctacagcaacatcatgaacttcttcaagaccgagatcaccctggccaacggcgagatccggaagcggcccctgatcgagaccaacggcgagaccggcgagatcgtgtgggacaagggccgggacttcgccaccgtgcggaaggtgctgagcatgccccaggtgaacatcgtgaagaagaccgaggtgcagaccggcggcttcagcaaggagagcatcctgcccaagcggaacagcgacaagctgatcgcccggaagaaggactgggaccccaagaagtacggcggcttcgacagccccaccgtggcctacagcgtgctggtggtggccaaggtggagaagggcaagagcaagaagctgaagagcgtgaaggagctgctgggcatcaccatcatggagcggagcagcttcgagaagaaccccatcgacttcctggaggccaagggctacaaggaggtgaagaaggacctgatcatcaagctgcccaagtacagcctgttcgagctggagaacggccggaagcggatgctggccagcgccggcgagctgcagaagggcaacgagctggccctgcccagcaagtacgtgaacttcctgtacctggccagccactacgagaagctgaagggcagccccgaggacaacgagcagaagcagctgttcgtggagcagcacaagcactacctggacgagatcatcgagcagatcagcgagttcagcaagcgggtgatcctggccgacgccaacctggacaaggtgctgagcgcctacaacaagcaccgggacaagcccatccgggagcaggccgagaacatcatccacctgttcaccctgaccaacctgggcgcccccgccgccttcaagtacttcgacaccaccatcgaccggaagcggtacaccagcaccaaggaggtgctggacgccaccctgatccaccagagcatcaccggcctgtacgagacccggatcgacctgagccagctgggcggcgacggcagcggcagccccaagaagaagcggaaggtggacggcagccccaagaagaagcggaaggtggacagcggc

SEQ ID NO: 90 - DNA, 4101 bp, synthetic construct
  misc_feature 1..4101: note = Synthetic
  source 1..4101: mol_type = other DNA
gacaagaagtacagcatcggcctggccatcggcaccaacagcgtgggctgggccgtgatcaccgacgagtacaaggtgcccagcaagaagttcaaggtgctgggcaacaccgaccggcacagcatcaagaagaacctgatcggcgccctgctgttcgacagcggcgagaccgccgaggccacccggctgaagcggaccgcccggcggcggtacacccggcggaagaaccggatctgctacctgcaggagatcttcagcaacgagatggccaaggtggacgacagcttcttccaccggctggaggagagcttcctggtggaggaggacaagaagcacgagcggcaccccatcttcggcaacatcgtggacgaggtggcctaccacgagaagtaccccaccatctaccacctgcggaagaagctggtggacagcaccgacaaggccgacctgcggctgatctacctggccctggcccacatgatcaagttccggggccacttcctgatcgagggcgacctgaaccccgacaacagcgacgtggacaagctgttcatccagctggtgcagacctacaaccagctgttcgaggagaaccccatcaacgccagcggcgtggacgccaaggccatcctgagcgcccggctgagcaagagccggcggctggagaacctgatcgcccagctgcccggcgagaagaagaacggcctgttcggcaacctgatcgccctgagcctgggcctgacccccaacttcaagagcaacttcgacctggccgaggacgccaagctgcagctgagcaaggacacctacgacgacgacctggacaacctgctggcccagatcggcgaccagtacgccgacctgttcctggccgccaagaacctgagcgacgccatcctgctgagcgacatcctgcgggtgaacaccgagatcaccaaggcccccctgagcgccagcatgatcaagcggtacgacgagcaccaccaggacctgaccctgctgaaggccctggtgcggcagcagctgcccgagaagtacaaggagatcttcttcgaccagagcaagaacggctacgccggctacatcgacggcggcgccagccaggaggagttctacaagttcatcaagcccatcctggagaagatggacggcaccgaggagctgctggtgaagctgaaccgggaggacctgctgcggaagcagcggaccttcgacaacggcagcatcccccaccagatccacctgggcgagctgcacgccatcctgcggcggcaggaggacttctaccccttcctgaaggacaaccgggagaagatcgagaagatcctgaccttccggatcccctactacgtgggccccctggcccggggcaacagccggttcgcctggatgacccggaagagcgaggagaccatcaccccctggaacttcgaggaggtggtggacaagggcgccagcgcccagagcttcatcgagcggatgaccaacttcgacaagaacctgcccaacgagaaggtgctgcccaagcacagcctgctgtacgagtacttcaccgtgtacaacgagctgaccaaggtgaagtacgtgaccgagggcatgcggaagcccgccttcctgagcggcgagcagaagaaggccatcgtggacctgctgttcaagaccaaccggaaggtgaccgtgaagcagctgaaggaggactacttcaagaagatcgagtgcttcgacagcgtggagatcagcggcgtggaggaccggttcaacgccagcctgggcacctaccacgacctgctgaagatcatcaaggacaaggacttcctggacaacgaggagaacgaggacatcctggaggacatcgtgctgaccctgaccctgttcgaggaccgggagatgatcgaggagcggctgaagacctacgcccacctgttcgacgacaaggtgatgaagcagctgaagcggcggcggtacaccggctggggccggctgagccggaagctgatcaacggcatccgggacaagcagagcggcaagaccatcctggacttcctgaagagcgacggcttcgccaaccggaacttcatgcagctgatccacgacgacagcctgaccttcaaggaggacatccagaaggcccaggtgagcggccagggcgacagcctgcacgagcacatcgccaacctggccggcagccccgccatcaagaagggcatcctgcagaccgtgaaggtggtggacgagctggtgaaggtgatgggccggcacaagcccgagaacatcgtgatcgagatggcccgggagaaccagaccacccagaagggccagaagaacagccgggagcggatgaagcggatcgaggagggcatcaaggagctgggcagccagatcctgaaggagcaccccgtggagaacacccagctgcagaacgagaagctgtacctgtactacctgcagaacggccgggacatgtacgtggaccaggagctggacatcaaccggctgagcgactacgacgtggaccacatcgtgccccagagcttcctgaaggacgacagcatcgacaacaaggtgctgacccggagcgacaagaaccggggcaagagcgacaacgtgcccagcgaggaggtggtgaagaagatgaagaactactggcggcagctgctgaacgccaagctgatcacccagcggaagttcgacaacctgaccaaggccgagcggggcggcctgagcgagctggacaaggccggcttcatcaagcggcagctggtggagacccggcagatcaccaagcacgtggcccagatcctggacagccggatgaacaccaagtacgacgagaacgacaagctgatccgggaggtgaaggtgatcaccctgaagagcaagctggtgagcgacttccggaaggacttccagttctacaaggtgcgggagatcaacaactaccaccacgcccacgacgcctacctgaacgccgtggtgggcaccgccctgatcaagaagtaccccaagctggagagcgagttcgtgtacggcgactacaaggtgtacgacgtgcggaagatgatcgccaagagcgagcaggagatcggcaaggccaccgccaagtacttcttctacagcaacatcatgaacttcttcaagaccgagatcaccctggccaacggcgagatccggaagcggcccctgatcgagaccaacggcgagaccggcgagatcgtgtgggacaagggccgggacttcgccaccgtgcggaaggtgctgagcatgccccaggtgaacatcgtgaagaagaccgaggtgcagaccggcggcttcagcaaggagagcatcctgcccaagcggaacagcgacaagctgatcgcccggaagaaggactgggaccccaagaagtacggcggcttcgacagccccaccgtggcctacagcgtgctggtggtggccaaggtggagaagggcaagagcaagaagctgaagagcgtgaaggagctgctgggcatcaccatcatggagcggagcagcttcgagaagaaccccatcgacttcctggaggccaagggctacaaggaggtgaagaaggacctgatcatcaagctgcccaagtacagcctgttcgagctggagaacggccggaagcggatgctggccagcgccggcgagctgcagaagggcaacgagctggccctgcccagcaagtacgtgaacttcctgtacctggccagccactacgagaagctgaagggcagccccgaggacaacgagcagaagcagctgttcgtggagcagcacaagcactacctggacgagatcatcgagcagatcagcgagttcagcaagcgggtgatcctggccgacgccaacctggacaaggtgctgagcgcctacaacaagcaccgggacaagcccatccgggagcaggccgagaacatcatccacctgttcaccctgaccaacctgggcgcccccgccgccttcaagtacttcgacaccaccatcgaccggaagcggtacaccagcaccaaggaggtgctggacgccaccctgatccaccagagcatcaccggcctgtacgagacccggatcgacctgagccagctgggcggcgac

SEQ ID NO: 91 - DNA, 50 bp, synthetic construct
  misc_feature 1..50: note = Synthetic
  source 1..50: mol_type = other DNA
acatttgcttctgacacaactgtgttcactagcaacctcaaacagacacc

SEQ ID NO: 92 - DNA, 66 bp, synthetic construct
  misc_feature 1..66: note = Synthetic
  source 1..66: mol_type = other DNA
cataaaccctggcgcgctcgcggcccggcactcttctggtccccacagactcagagagaacccacc

SEQ ID NO: 93 - DNA, 29 bp, synthetic construct
  misc_feature 1..29: note = Synthetic
  source 1..29: mol_type = other DNA
aagctcagaataaacgctcaactttggcc

SEQ ID NO: 94 - DNA, 27 bp, synthetic construct
  misc_feature 1..27: note = Synthetic
  source 1..27: mol_type = other DNA
cagggtcctgtggacagctcaccagct

SEQ ID NO: 95 - DNA, 61 bp, synthetic construct
  misc_feature 1..61: note = Synthetic
  source 1..61: mol_type = other DNA
tcccgcagtcggcgtccagcggctctgcttgttcgtgtgtgtgtcgttgcaggccttattc

SEQ ID NO: 96 - DNA, 42 bp, synthetic construct
  misc_feature 1..42: note = Synthetic
  source 1..42: mol_type = other DNA
cagatcgcctggagacgccatccacgctgttttgacctccat

SEQ ID NO: 97 - DNA, 42 bp, synthetic construct
  misc_feature 1..42: note = Synthetic
  source 1..42: mol_type = other DNA
agaagacaccgggaccgatccagcctccgcggccgggaacgg

SEQ ID NO: 98 - DNA, 42 bp, synthetic construct
  misc_feature 1..42: note = Synthetic
  source 1..42: mol_type = other DNA
tgcattggaacgcggattccccgtgccaagagtgactcaccg

SEQ ID NO: 99 - DNA, 132 bp, synthetic construct
  misc_feature 1..132: note = Synthetic
  source 1..132: mol_type = other DNA
gctcgctttcttgctgtccaatttctattaaaggttcctttgttccctaagtccaactactaaactgggggatattatgaagggccttgagcatctggattctgcctaataaaaaacatttattttcattgc

SEQ ID NO: 100 - DNA, 110 bp, synthetic construct
  misc_feature 1..110: note = Synthetic
  source 1..110: mol_type = other DNA
gctggagcctcggtggccatgcttcttgccccttgggcctccccccagcccctcctccccttcctgcacccgtacccccgtggtctttgaataaagtctgagtgggcggc

SEQ ID NO: 101 - DNA, 130 bp, synthetic construct
  misc_feature 1..130: note = Synthetic
  source 1..130: mol_type = other DNA
accagcctcaagaacacccgaatggagtctctaagctacataataccaacttacactttacaaaatgttgtcccccaaaatgtagccattcgtatctgctcctaataaaaagaaagtttcttcacattct

SEQ ID NO: 102 - DNA, 102 bp, synthetic construct
  misc_feature 1..102: note = Synthetic
  source 1..102: mol_type = other DNA
ttgccagccatctgttgtttgcccctcccccgtgccttccttgaccctggaaggtgccactcccactgtcctttcctaataaaatgaggaaattgcatcgca

SEQ ID NO: 103 - DNA, 93 bp, synthetic construct
  misc_feature 1..93: note = Synthetic
  source 1..93: mol_type = other DNA
gctgccttctgcggggcttgccttctggccatgcccttcttctctcccttgcacctgtacctcttggtctttgaataaagcctgagtaggaag

SEQ ID NO: 104 - DNA, 278 bp, synthetic construct
  misc_feature 1..278: note = Synthetic
  source 1..278: mol_type = other DNA
ctggtactgcatgcacgcaatgctagctgcccctttcccgtcctgggtaccccgagtctcccccgacctcgggtcccaggtatgctcccacctccacctgccccactcaccacctctgctagttccagacacctcccaagcacgcagcaatgcagctcaaaacgcttagcctagccacacccccacgggaaacagcagtgattaacctttagcaataaacgaaagtttaactaagctatactaaccccagggttggtcaatttcgtgccagccacacc

SEQ ID NO: 105 - DNA, 278 bp, synthetic construct
  misc_feature 1..278: note = Synthetic
  source 1..278: mol_type = other DNA
caagcacgcagcaatgcagctcaaaacgcttagcctagccacacccccacgggaaacagcagtgattaacctttagcaataaacgaaagtttaactaagctatactaaccccagggttggtcaatttcgtgccagccacaccctggtactgcatgcacgcaatgctagctgcccctttcccgtcctgggtaccccgagtctcccccgacctcgggtcccaggtatgctcccacctccacctgccccactcaccacctctgctagttccagacacctcc

SEQ ID NO: 106 - DNA, 260 bp, synthetic construct
  misc_feature 1..260: note = Synthetic
  source 1..260: mol_type = other DNA
accagcctcaagaacacccgaatggagtctctaagctacataataccaacttacactttacaaaatgttgtcccccaaaatgtagccattcgtatctgctcctaataaaaagaaagtttcttcacattctaccagcctcaagaacacccgaatggagtctctaagctacataataccaacttacactttacaaaatgttgtcccccaaaatgtagccattcgtatctgctcctaataaaaagaaagtttcttcacattct

SEQ ID NO: 107 - RNA, 10 nt, synthetic construct
  misc_feature 1..10: note = Synthetic
  source 1..10: mol_type = other RNA
gccrccatgg

SEQ ID NO: 108 - RNA, 13 nt, synthetic construct
  misc_feature 1..13: note = Synthetic
  source 1..13: mol_type = other RNA
gccgccrccatgg

SEQ ID NO: 109 - DNA, 105 bp, synthetic construct
  misc_feature 1..105: note = Synthetic
  source 1..105: mol_type = other DNA
aaaaaaaaaaaaaaaaaaaaaaaaaaaaaagcgaaaaaaaaaaaaaaaaaaaaaaaaaaaaaaccgaaaaaaaaaaaaaaaaaaaaaaaaaaaaaaaaaaaaaaa

SEQ ID NO: 110 - protein, 9 aa, synthetic construct
  REGION 1..9: note = Synthetic
LAAKRSRTT

SEQ ID NO: 111 - protein, 9 aa, synthetic construct
  REGION 1..9: note = Synthetic
QAAKRSRTT

SEQ ID NO: 112 - protein, 10 aa, synthetic construct
  REGION 1..10: note = Synthetic
PAPAKRERTT

SEQ ID NO: 113 - protein, 9 aa, synthetic construct
  REGION 1..9: note = Synthetic
QAAKRPRTT

SEQ ID NO: 114 - protein, 9 aa, synthetic construct
  REGION 1..9: note = Synthetic
RAAKRPRTT

SEQ ID NO: 115 - protein, 11 aa, synthetic construct
  REGION 1..11: note = Synthetic
AAAKRSWSMAA

SEQ ID NO: 116 - protein, 11 aa, synthetic construct
  REGION 1..11: note = Synthetic
AAAKRVWSMAF

SEQ ID NO: 117 - protein, 11 aa, synthetic construct
  REGION 1..11: note = Synthetic
AAAKRSWSMAF

SEQ ID NO: 118 - protein, 10 aa, synthetic construct
  REGION 1..10: note = Synthetic
AAAKRKYFAA

SEQ ID NO: 119 - protein, 10 aa, synthetic construct
  REGION 1..10: note = Synthetic
RAAKRKAFAA

SEQ ID NO: 120 - protein, 10 aa, synthetic construct
  REGION 1..10: note = Synthetic
RAAKRKYFAV

SEQ ID NO: 121 - protein, 7 aa, synthetic construct
  REGION 1..7: note = Synthetic
PKKKRRV

SEQ ID NO: 122 - protein, 16 aa, synthetic construct
  REGION 1..16: note = Synthetic
KRPAATKKAGQAKKKK

SEQ ID NO: 123 - DNA, 21 bp, synthetic construct
  misc_feature 1..21: note = Synthetic
  source 1..21: mol_type = other DNA
ccgaagaagaagagaaaggtc

SEQ ID NO: 124 - DNA, 27 bp, synthetic construct
  misc_feature 1..27: note = Synthetic
  source 1..27: mol_type = other DNA
ctggcagcaaagagaagcagaacaaca

SEQ ID NO: 125 - DNA, 27 bp, synthetic construct
  misc_feature 1..27: note = Synthetic
  source 1..27: mol_type = other DNA
caggcagcaaagagaagcagaacaaca

SEQ ID NO: 126 - DNA, 30 bp, synthetic construct
  misc_feature 1..30: note = Synthetic
  source 1..30: mol_type = other DNA
ccggcaccggcaaagagagaaagaacaaca

SEQ ID NO: 127 - DNA, 27 bp, synthetic construct
  misc_feature 1..27: note = Synthetic
  source 1..27: mol_type = other DNA
caggcagcaaagagaccgagaacaaca

SEQ ID NO: 128 - DNA, 27 bp, synthetic construct
  misc_feature 1..27: note = Synthetic
  source 1..27: mol_type = other DNA
agagcagcaaagagaccgagaacaaca

SEQ ID NO: 129 - DNA, 33 bp, synthetic construct
  misc_feature 1..33: note = Synthetic
  source 1..33: mol_type = other DNA
gcagcagcaaagagaagctggagcatggcagca

SEQ ID NO: 130 - DNA, 33 bp, synthetic construct
  misc_feature 1..33: note = Synthetic
  source 1..33: mol_type = other DNA
gcagcagcaaagagagtctggagcatggcattc

SEQ ID NO: 131 - DNA, 33 bp, synthetic construct
  misc_feature 1..33: note = Synthetic
  source 1..33: mol_type = other DNA
gcagcagcaaagagaagctggagcatggcattc

SEQ ID NO: 132 - DNA, 30 bp, synthetic construct
  misc_feature 1..30: note = Synthetic
  source 1..30: mol_type = other DNA
gcagcagcaaagagaaagtacttcgcagca

SEQ ID NO: 133 - DNA, 30 bp, synthetic construct
  misc_feature 1..30: note = Synthetic
  source 1..30: mol_type = other DNA
agagcagcaaagagaaaggcattcgcagca

SEQ ID NO: 134 - DNA, 30 bp, synthetic construct
  misc_feature 1..30: note = Synthetic
  source 1..30: mol_type = other DNA
agagcagcaaagagaaagtacttcgcagtc

SEQ ID NO: 135 - DNA, 21 bp, synthetic construct
  misc_feature 1..21: note = Synthetic
  source 1..21: mol_type = other DNA
ccgaagaagaagagaagagtc

SEQ ID NO: 136-138 - skipped (3 entries)

SEQ ID NO: 139 - RNA, 22 nt, synthetic construct
  misc_feature 1..22: note = Synthetic
  source 1..22: mol_type = other RNA
gttttagagctatgctgttttg

SEQ ID NO: 140 - RNA, 76 nt, synthetic construct
  misc_feature 1..76: note = Synthetic
  source 1..76: mol_type = other RNA
gttttagagctagaaatagcaagttaaaataaggctagtccgttatcaacttgaaaaagtggcaccgagtcggtgc

SEQ ID NO: 141 - RNA, 100 nt, synthetic construct
  misc_feature 1..100: note = Synthetic
  modified_base 1..100: mod_base = OTHER; note = 2'-O-Me and PS modification may or may not be present
  variation 1..20: note = n is a, c, g, or u
  source 1..100: mol_type = other RNA
nnnnnnnnnnnnnnnnnnnngttttagagctagaaatagcaagttaaaataaggctagtccgttatcaacttgaaaaagtggcaccgagtcggtgctttt

SEQ ID NO: 142 - RNA, 80 nt, synthetic construct
  misc_feature 1..80: note = Synthetic
  modified_base 1..80: mod_base = OTHER; note = 2'-O-Me and PS modification may or may not be present
  source 1..80: mol_type = other RNA
gttttagagctagaaatagcaagttaaaataaggctagtccgttatcaacttgaaaaagtggcaccgagtcggtgctttt

SEQ ID NO: 143 - RNA, 84 nt, synthetic construct
  misc_feature 1..84: note = Synthetic
  modified_base 1..84: mod_base = OTHER; note = 2'-O-Me and PS modification may or may not be present
  variation 1..4: note = n is a, c, g, or u
  source 1..84: mol_type = other RNA
nnnngttttagagctagaaatagcaagttaaaataaggctagtccgttatcaacttgaaaaagtggcaccgagtcggtgctttt

SEQ ID NO: 144 - RNA, 81 nt, synthetic construct
  misc_feature 1..81: note = Synthetic
  modified_base 1..81: mod_base = OTHER; note = 2'-O-Me and PS modification may or may not be present
  variation 1: note = n is a, c, g, or u
  source 1..81: mol_type = other RNA
ngttttagagctagaaatagcaagttaaaataaggctagtccgttatcaacttgaaaaagtggcaccgagtcggtgctttt

SEQ ID NO: 145 - RNA, 100 nt, synthetic construct; identical to SEQ ID NO: 141
  misc_feature 1..100: note = Synthetic
  modified_base 1..100: mod_base = OTHER; note = 2'-O-Me and PS modification may or may not be present
  variation 1..20: note = n is a, c, g, or u
  source 1..100: mol_type = other RNA

SEQ ID NO: 146-150 - skipped (5 entries)

SEQ ID NO: 151 - RNA, 20 nt, synthetic construct
  misc_feature 1..20: note = Synthetic
  source 1..20: mol_type = other RNA
taaggccagtggaaagaatt

SEQ ID NO: 152 - RNA, 20 nt, synthetic construct
  misc_feature 1..20: note = Synthetic
  source 1..20: mol_type = other RNA
ttaccccacttaactatctt

SEQ ID NO: 153 - RNA, 20 nt, synthetic construct
  misc_feature 1..20: note = Synthetic
  source 1..20: mol_type = other RNA
ttacagccacgtctacagca

SEQ ID NO: 154 - RNA, 20 nt, synthetic construct
  misc_feature 1..20: note = Synthetic
  source 1..20: mol_type = other RNA
ttcaaaacctgtcagtgatt

SEQ ID NO: 155 - RNA, 20 nt, synthetic construct
  misc_feature 1..20: note = Synthetic
  source 1..20: mol_type = other RNA
cgctgtcaagtccagttcta

SEQ ID NO: 156 - RNA, 20 nt, synthetic construct
  misc_feature 1..20: note = Synthetic
  source 1..20: mol_type = other RNA
ccttccgaaagaggcccccc

SEQ ID NO: 157 - RNA, 20 nt, synthetic construct
  misc_feature 1..20: note = Synthetic
  source 1..20: mol_type = other RNA
tccctggctgaggatcccca

SEQ ID NO: 158 - RNA, 20 nt, synthetic construct
  misc_feature 1..20: note = Synthetic
  source 1..20: mol_type = other RNA
actcacgatgaaatcctgga

SEQ ID NO: 159 - RNA, 20 nt, synthetic construct
  misc_feature 1..20: note = Synthetic
  source 1..20: mol_type = other RNA
ccccccgccgtgtttgtggg

SEQ ID NO: 160 - RNA, 20 nt, synthetic construct
  misc_feature 1..20: note = Synthetic
  source 1..20: mol_type = other RNA
gagccccccactgtggtgac

SEQ ID NO: 161 - RNA, 20 nt, synthetic construct
  misc_feature 1..20: note = Synthetic
  source 1..20: mol_type = other RNA
accggctctgcaaaggccag

SEQ ID NO: 162 - RNA, 20 nt, synthetic construct
  misc_feature 1..20: note = Synthetic
  source 1..20: mol_type = other RNA
caccggctctgcaaaggcca

SEQ ID NO: 163 - RNA, 20 nt, synthetic construct
  misc_feature 1..20: note = Synthetic
  source 1..20: mol_type = other RNA
ccaccggctctgcaaaggcc

SEQ ID NO: 164 - RNA, 20 nt, synthetic construct
  misc_feature 1..20: note = Synthetic
  source 1..20: mol_type = other RNA
ctgctccaccggctctgcaa

SEQ ID NO: 165 - RNA, 20 nt, synthetic construct
  misc_feature 1..20: note = Synthetic
  source 1..20: mol_type = other RNA
ctgtgtcacccgtttcaggt

SEQ ID NO: 166 - RNA, 20 nt, synthetic construct
  misc_feature 1..20: note = Synthetic
  source 1..20: mol_type = other RNA
tgtgtcacccgtttcaggtg

SEQ ID NO: 167 - RNA, 20 nt, synthetic construct
  misc_feature 1..20: note = Synthetic
  source 1..20: mol_type = other RNA
acccgtttcaggtggggtga

SEQ ID NO: 168 - RNA, 20 nt, synthetic construct
  misc_feature 1..20: note = Synthetic
  source 1..20: mol_type = other RNA
cccgtttcaggtggggtgag

SEQ ID NO: 169 - RNA, 20 nt, synthetic construct
  misc_feature 1..20: note = Synthetic
  source 1..20: mol_type = other RNA
tgtgcagactcagaggtgag

SEQ ID NO: 170 - RNA, 20 nt, synthetic construct
  misc_feature 1..20: note = Synthetic
  source 1..20: mol_type = other RNA
cagcgcatccaggctgcagg

SEQ ID NO: 171 - RNA, 20 nt, synthetic construct
  misc_feature 1..20: note = Synthetic
  source 1..20: mol_type = other RNA
gcgtccacatcctgcaaggg

SEQ ID NO: 172 - RNA, 20 nt, synthetic construct
  misc_feature 1..20: note = Synthetic
  source 1..20: mol_type = other RNA
ggcgtccacatcctgcaagg

SEQ ID NO: 173 - RNA, 20 nt, synthetic construct
  misc_feature 1..20: note = Synthetic
  source 1..20: mol_type = other RNA
tgggcgtccacatcctgcaa

SEQ ID NO: 174-176 - skipped (3 entries)

SEQ ID NO: 177 - RNA, 100 nt, synthetic construct
  misc_feature 1..100: note = Synthetic
  modified_base 1..100: mod_base = OTHER; note = 2'-O-Me and PS modification may or may not be present
  source 1..100: mol_type = other RNA
taggcagacagacttgtcacgttttagagctagaaatagcaagttaaaataaggctagtccgttatcaacttgaaaaagtggcaccgagtcggtgctttt

SEQ ID NO: 178 - RNA, 100 nt, synthetic construct
  misc_feature 1..100: note = Synthetic
  modified_base 1..100: mod_base = OTHER; note = 2'-O-Me and PS modification may or may not be present
  source 1..100: mol_type = other RNA
tttcaaaacctgtcagtgatgttttagagctagaaatagcaagttaaaataaggctagtccgttatcaacttgaaaaagtggcaccgagtcggtgctttt

SEQ ID NO: 179 - RNA, 100 nt, synthetic construct
  misc_feature 1..100: note = Synthetic
  modified_base 1..100: mod_base = OTHER; note = 2'-O-Me and PS modification may or may not be present
  source 1..100: mol_type = other RNA
actcacgctggatagcctccgttttagagctagaaatagcaagttaaaataaggctagtccgttatcaacttgaaaaagtggcaccgagtcggtgctttt

SEQ ID NO: 180 - RNA, 100 nt, synthetic construct
  misc_feature 1..100: note = Synthetic
  modified_base 1..100: mod_base = OTHER; note = 2'-O-Me and PS modification may or may not be present
  source 1..100: mol_type = other RNA
cttaccccacttaactatctgttttagagctagaaatagcaagttaaaataaggctagtccgttatcaacttgaaaaagtggcaccgagtcggtgctttt

SEQ ID NO: 181 - RNA, 100 nt, synthetic construct
  misc_feature 1..100: note = Synthetic
  modified_base 1..100: mod_base = OTHER; note = 2'-O-Me and PS modification may or may not be present
  source 1..100: mol_type = other RNA
taaggccagtggaaagaattgttttagagctagaaatagcaagttaaaataaggctagtccgttatcaacttgaaaaagtggcaccgagtcggtgctttt

SEQ ID NO: 182 - RNA, 100 nt, synthetic construct
  misc_feature 1..100: note = Synthetic
  modified_base 1..100: mod_base = OTHER; note = 2'-O-Me and PS modification may or may not be present
  source 1..100: mol_type = other RNA
ttaccccacttaactatcttgttttagagctagaaatagcaagttaaaataaggctagtccgttatcaacttgaaaaagtggcaccgagtcggtgctttt

SEQ ID NO: 183 - RNA, 100 nt, synthetic construct
  misc_feature 1..100: note = Synthetic
  modified_base 1..100: mod_base = OTHER; note = 2'-O-Me and PS modification may or may not be present
  source 1..100: mol_type = other RNA
ttacagccacgtctacagcagttttagagctagaaatagcaagttaaaataaggctagtccgttatcaacttgaaaaagtggcaccgagtcggtgctttt

SEQ ID NO: 184 - RNA, 100 nt, synthetic construct
  misc_feature 1..100: note = Synthetic
  modified_base 1..100: mod_base = OTHER; note = 2'-O-Me and PS modification may or may not be present
  source 1..100: mol_type = other RNA
ttcaaaacctgtcagtgattgttttagagctagaaatagcaagttaaaataaggctagtccgttatcaacttgaaaaagtggcaccgagtcggtgctttt

SEQ ID NO: 185 - RNA, 100 nt, synthetic construct
  misc_feature 1..100: note = Synthetic
  modified_base 1..100: mod_base = OTHER; note = 2'-O-Me and PS modification may or may not be present
  source 1..100: mol_type = other RNA
cgctgtcaagtccagttctagttttagagctagaaatagcaagttaaaataaggctagtccgttatcaacttgaaaaagtggcaccgagtcggtgctttt

SEQ ID NO: 186 - RNA, 100 nt, synthetic construct
  misc_feature 1..100: note = Synthetic
  source 1..100: mol_type = other RNA
ccttccgaaagaggccccccgttttagagctagaaatagcaagttaaaataaggctagtccgttatcaacttgaaaaagtggcaccgagtcggtgctttt

SEQ ID NO: 187 - RNA, 100 nt, synthetic construct
  misc_feature 1..100: note = Synthetic
  source 1..100: mol_type = other RNA
tccctggctgaggatccccagttttagagctagaaatagcaagttaaaataaggctagtccgttatcaacttgaaaaagtggcaccgagtcggtgctttt

SEQ ID NO: 188 - RNA, 100 nt, synthetic construct
  misc_feature 1..100: note = Synthetic
  source 1..100: mol_type = other RNA
actcacgatgaaatcctggagttttagagctagaaatagcaagttaaaataaggctagtccgttatcaacttgaaaaagtggcaccgagtcggtgctttt

SEQ ID NO: 189 - RNA, 100 nt, synthetic construct
  misc_feature 1..100: note = Synthetic
  source 1..100: mol_type = other RNA
ccccccgccgtgtttgtggggttttagagctagaaatagcaagttaaaataaggctagtccgttatcaacttgaaaaagtggcaccgagtcggtgctttt

SEQ ID NO: 190 - RNA, 100 nt, synthetic construct
  misc_feature 1..100: note = Synthetic
  source 1..100: mol_type = other RNA
gagccccccactgtggtgacgttttagagctagaaatagcaagttaaaataaggctagtccgttatcaacttgaaaaagtggcaccgagtcggtgctttt

SEQ ID NO: 191 - RNA, 100 nt, synthetic construct
  misc_feature 1..100: note = Synthetic
  modified_base 1..100: mod_base = OTHER; note = 2'-O-Me and PS modification may or may not be present
  source 1..100: mol_type = other RNA
accggctctgcaaaggccaggttttagagctagaaatagcaagttaaaataaggctagtccgttatcaacttgaaaaagtggcaccgagtcggtgctttt

SEQ ID NO: 192 - RNA, 100 nt, synthetic construct
  misc_feature 1..100: note = Synthetic
  modified_base 1..100: mod_base = OTHER; note = 2'-O-Me and PS modification may or may not be present
  source 1..100: mol_type = other RNA
caccggctctgcaaaggccagttttagagctagaaatagcaagttaaaataaggctagtccgttatcaacttgaaaaagtggcaccgagtcggtgctttt

SEQ ID NO: 193 - RNA, 100 nt, synthetic construct
  misc_feature 1..100: note = Synthetic
  modified_base 1..100: mod_base = OTHER; note = 2'-O-Me and PS modification may or may not be present
  source 1..100: mol_type = other RNA
ccaccggctctgcaaaggccgttttagagctagaaatagcaagttaaaataaggctagtccgttatcaacttgaaaaagtggcaccgagtcggtgctttt

SEQ ID NO: 194 - RNA, 100 nt, synthetic construct
  misc_feature 1..100: note = Synthetic
  modified_base 1..100: mod_base = OTHER; note = 2'-O-Me and PS modification may or may not be present
  source 1..100: mol_type = other RNA
ctgctccaccggctctgcaagttttagagctagaaatagcaagttaaaataaggctagtccgttatcaacttgaaaaagtggcaccgagtcggtgctttt

SEQ ID NO: 195 - RNA, 100 nt, synthetic construct
  misc_feature 1..100: note = Synthetic
  modified_base 1..100: mod_base = OTHER; note = 2'-O-Me and PS modification may or may not be present
  source 1..100: mol_type = other RNA
ctgtgtcacccgtttcaggtgttttagagctagaaatagcaagttaaaataaggctagtccgttatcaacttgaaaaagtggcaccgagtcggtgctttt

SEQ ID NO: 196 - RNA, 100 nt, synthetic construct
  misc_feature 1..100: note = Synthetic
  modified_base 1..100: mod_base = OTHER; note = 2'-O-Me and PS modification may or may not be present
  source 1..100: mol_type = other RNA
tgtgtcacccgtttcaggtggttttagagctagaaatagcaagttaaaataaggctagtccgttatcaacttgaaaaagtggcaccgagtcggtgctttt

SEQ ID NO: 197 - RNA, 100 nt, synthetic construct
  misc_feature 1..100: note = Synthetic
  modified_base 1..100: mod_base = OTHER; note = 2'-O-Me and PS modification may or may not be present
  source 1..100: mol_type = other RNA
acccgtttcaggtggggtgagttttagagctagaaatagcaagttaaaataaggctagtccgttatcaacttgaaaaagtggcaccgagtcggtgctttt

SEQ ID NO: 198 - RNA, 100 nt, synthetic construct
  misc_feature 1..100: note = Synthetic
  modified_base 1..100: mod_base = OTHER; note = 2'-O-Me and PS modification may or may not be present
  source 1..100: mol_type = other RNA
cccgtttcaggtggggtgaggttttagagctagaaatagcaagttaaaataaggctagtccgttatcaacttgaaaaagtggcaccgagtcggtgctttt

SEQ ID NO: 199 - RNA, 100 nt, synthetic construct
  misc_feature 1..100: note = Synthetic
  modified_base 1..100: mod_base = OTHER; note = 2'-O-Me and PS modification may or may not be present
  source 1..100: mol_type = other RNA
tgtgcagactcagaggtgaggttttagagctagaaatagcaagttaaaataaggctagtccgttatcaacttgaaaaagtggcaccgagtcggtgctttt

SEQ ID NO: 200 - RNA, 100 nt, synthetic construct
  misc_feature 1..100: note = Synthetic
  modified_base 1..100: mod_base = OTHER; note = 2'-O-Me and PS modification may or may not be present
  source 1..100: mol_type = other RNA
cagcgcatccaggctgcagggttttagagctagaaatagcaagttaaaataaggctagtccgttatcaacttgaaaaagtggcaccgagtcggtgctttt

SEQ ID NO: 201 - RNA, 100 nt, synthetic construct
  misc_feature 1..100: note = Synthetic
  modified_base 1..100: mod_base = OTHER; note = 2'-O-Me and PS modification may or may not be present
  source 1..100: mol_type = other RNA
gcgtccacatcctgcaaggggttttagagctagaaatagcaagttaaaataaggctagtccgttatcaacttgaaaaagtggcaccgagtcggtgctttt

SEQ ID NO: 202 - RNA, 100 nt, synthetic construct
  misc_feature 1..100: note = Synthetic
  modified_base 1..100: mod_base = OTHER; note = 2'-O-Me and PS modification may or may not be present
  source 1..100: mol_type = other RNA
ggcgtccacatcctgcaagggttttagagctagaaatagcaagttaaaataaggctagtccgttatcaacttgaaaaagtggcaccgagtcggtgctttt

SEQ ID NO: 203 - RNA, 100 nt, synthetic construct
  misc_feature 1..100: note = Synthetic
  modified_base 1..100: mod_base = OTHER; note = 2'-O-Me and PS modification may or may not be present
  source 1..100: mol_type = other RNA
tgggcgtccacatcctgcaagttttagagctagaaatagcaagttaaaataaggctagtccgttatcaacttgaaaaagtggcaccgagtcggtgctttt

SEQ ID NO: 204-211 - skipped (8 entries)

SEQ ID NO: 212 - protein, 5 aa, synthetic construct
  REGION 1..5: note = Synthetic
GGGGS

SEQ ID NO: 213 - protein, 5 aa, synthetic construct
  REGION 1..5: note = Synthetic
EAAAK

SEQ ID NO: 214 - protein, 5 aa, synthetic construct
  REGION 1..5: note = Synthetic
SEGSA

SEQ ID NO: 215 - protein, 9 aa, synthetic construct
  REGION 1..9: note = Synthetic
SEGSAGTST

SEQ ID NO: 216 - protein, 10 aa, synthetic construct
  REGION 1..10: note = Synthetic
GGGGSGGGGS

SEQ ID NO: 217 - protein, 10 aa, synthetic construct
  REGION 1..10: note = Synthetic
GGGGSEAAAK

SEQ ID NO: 218 - protein, 10 aa, synthetic construct
  REGION 1..10: note = Synthetic
EAAAKGGGGS

SEQ ID NO: 219 - protein, 10 aa, synthetic construct
  REGION 1..10: note = Synthetic
EAAAKEAAAK

SEQ ID NO: 220 - protein, 15 aa, synthetic construct
  REGION 1..15: note = Synthetic
SEGSAGTSTESEGSA

SEQ ID NO: 221 - protein, 15 aa, synthetic construct
  REGION 1..15: note = Synthetic
GGGGSGGGGSGGGGS

SEQ ID NO: 222 - protein, 15 aa, synthetic construct
  REGION 1..15: note = Synthetic
GGGGSGGGGSEAAAK

SEQ ID NO: 223 - protein, 15 aa, synthetic construct
  REGION 1..15: note = Synthetic
GGGGSEAAAKGGGGS

SEQ ID NO: 224 - protein, 15 aa, synthetic construct
  REGION 1..15: note = Synthetic
EAAAKGGGGSEAAAK

SEQ ID NO: 225 - protein, 15 aa, synthetic construct
  REGION 1..15: note = Synthetic
EAAAKEAAAKGGGGS

SEQ ID NO: 226 - protein, 20 aa, synthetic construct
  REGION 1..20: note = Synthetic
SEGSAGTSTESEGSAGTSTE

SEQ ID NO: 227 - protein, 20 aa, synthetic construct
  REGION 1..20: note = Synthetic
GGGGSGGGGSGGGGSEAAAK

SEQ ID NO: 228 - protein, 20 aa, synthetic construct
  REGION 1..20: note = Synthetic
GGGGSGGGGSEAAAKGGGGS

SEQ ID NO: 229 - protein, 20 aa, synthetic construct
  REGION 1..20: note = Synthetic
GGGGSEAAAKGGGGSEAAAK

SEQ ID NO: 230 - protein, 20 aa, synthetic construct
  REGION 1..20: note = Synthetic
GGGGSEAAAKEAAAKGGGGS

SEQ ID NO: 231 - protein, 20 aa, synthetic construct
  REGION 1..20: note = Synthetic
GGGGSEAAAKEAAAKEAAAK

SEQ ID NO: 232 - protein, 20 aa, synthetic construct
  REGION 1..20: note = Synthetic
EAAAKGGGGSGGGGSGGGGS

SEQ ID NO: 233 - protein, 20 aa, synthetic construct
  REGION 1..20: note = Synthetic
EAAAKGGGGSGGGGSEAAAK

SEQ ID NO: 234 - protein, 20 aa, synthetic construct
  REGION 1..20: note = Synthetic
EAAAKGGGGSEAAAKGGGGS

SEQ ID NO: 235 - protein, 20 aa, synthetic construct
  REGION 1..20: note = Synthetic
EAAAKGGGGSEAAAKEAAAK

SEQ ID NO: 236 - protein, 20 aa, synthetic construct
  REGION 1..20: note = Synthetic
EAAAKEAAAKGGGGSGGGGS

SEQ ID NO: 237 - protein, 20 aa, synthetic construct
  REGION 1..20: note = Synthetic
EAAAKEAAAKGGGGSEAAAK

SEQ ID NO: 238 - protein, 20 aa, synthetic construct
  REGION 1..20: note = Synthetic
EAAAKEAAAKEAAAKGGGGS

SEQ ID NO: 239 - protein, 25 aa, synthetic construct
  REGION 1..25: note = Synthetic
SEGSAGTSTESEGSAGTSTESEGSA

SEQ ID NO: 240 - protein, 25 aa, synthetic construct
  REGION 1..25: note = Synthetic
GGGGSGGGGSGGGGSGGGGSGGGGS

SEQ ID NO: 241 - protein, 25 aa, synthetic construct
  REGION 1..25: note = Synthetic
GGGGSGGGGSGGGGSGGGGSEAAAK

SEQ ID NO: 242 - protein, 25 aa, synthetic construct
  REGION 1..25: note = Synthetic
GGGGSGGGGSGGGGSEAAAKGGGGS

SEQ ID NO: 243 - protein, 25 aa, synthetic construct
  REGION 1..25: note = Synthetic
GGGGSGGGGSGGGGSEAAAKEAAAK

SEQ ID NO: 244 - protein, 25 aa, synthetic construct
  REGION 1..25: note = Synthetic
GGGGSGGGGSEAAAKGGGGSGGGGS

SEQ ID NO: 245 - protein, 25 aa, synthetic construct
  REGION 1..25: note = Synthetic
GGGGSGGGGSEAAAKGGGGSEAAAK

SEQ ID NO: 246 - protein, 25 aa, synthetic construct
  REGION 1..25: note = Synthetic
GGGGSGGGGSEAAAKEAAAKGGGGS

SEQ ID NO: 247 - protein, 25 aa, synthetic construct
  REGION 1..25: note = Synthetic
GGGGSGGGGSEAAAKEAAAKEAAAK

SEQ ID NO: 248 - protein, 25 aa, synthetic construct
  REGION 1..25: note = Synthetic
GGGGSEAAAKGGGGSGGGGSGGGGS

SEQ ID NO: 249 - protein, 25 aa, synthetic construct
  REGION 1..25: note = Synthetic
GGGGSEAAAKGGGGSGGGGSEAAAK

SEQ ID NO: 250 - protein, 25 aa, synthetic construct
  REGION 1..25: note = Synthetic
GGGGSEAAAKGGGGSEAAAKGGGGS

SEQ ID NO: 251 - protein, 25 aa, synthetic construct
  REGION 1..25: note = Synthetic
GGGGSEAAAKGGGGSEAAAKEAAAK

SEQ ID NO: 252 - protein, 25 aa, synthetic construct
  REGION 1..25: note = Synthetic
GGGGSEAAAKEAAAKGGGGSGGGGS

SEQ ID NO: 253 - protein, 25 aa, synthetic construct
  REGION 1..25: note = Synthetic
GGGGSEAAAKEAAAKEAAAKGGGGS

SEQ ID NO: 254 - protein, 25 aa, synthetic construct
  REGION 1..25: note = Synthetic
GGGGSEAAAKEAAAKEAAAKEAAAK

SEQ ID NO: 255 - protein, 25 aa, synthetic construct
  REGION 1..25: note = Synthetic
EAAAKGGGGSGGGGSGGGGSGGGGS

SEQ ID NO: 256 - protein, 25 aa, synthetic construct
  REGION 1..25: note = Synthetic
EAAAKGGGGSGGGGSGGGGSEAAAK

SEQ ID NO: 257 - protein, 25 aa, synthetic construct
  REGION 1..25: note = Synthetic
EAAAKGGGGSGGGGSEAAAKGGGGS

SEQ ID NO: 258 - protein, 25 aa, synthetic construct
  REGION 1..25: note = Synthetic
EAAAKGGGGSGGGGSEAAAKEAAAK

SEQ ID NO: 259 - protein, 25 aa, synthetic construct
  REGION 1..25: note = Synthetic
EAAAKGGGGSEAAAKGGGGSGGGGS

SEQ ID NO: 260 - protein, 25 aa, synthetic construct
  REGION 1..25: note = Synthetic
EAAAKGGGGSEAAAKGGGGSEAAAK

SEQ ID NO: 261 - protein, 25 aa, synthetic construct
  REGION 1..25: note = Synthetic
EAAAKGGGGSEAAAKEAAAKGGGGS

SEQ ID NO: 262 - protein, 25 aa, synthetic construct
  REGION 1..25: note = Synthetic
EAAAKGGGGSEAAAKEAAAKEAAAK

SEQ ID NO: 263 - protein, 25 aa, synthetic construct
  REGION 1..25: note = Synthetic
EAAAKEAAAKGGGGSEAAAKGGGGS

SEQ ID NO: 264 - protein, 25 aa, synthetic construct
  REGION 1..25: note = Synthetic
EAAAKEAAAKGGGGSEAAAKEAAAK

SEQ ID NO: 265 - protein, 25 aa, synthetic construct
  REGION 1..25: note = Synthetic
EAAAKEAAAKEAAAKGGGGSEAAAK

SEQ ID NO: 266 - protein, 25 aa, synthetic construct
  REGION 1..25: note = Synthetic
EAAAKEAAAKEAAAKEAAAKGGGGS

SEQ ID NO: 267 - protein, 25 aa, synthetic construct
  REGION 1..25: note = Synthetic
EAAAKEAAAKEAAAKEAAAKEAAAK

SEQ ID NO: 268 - protein, 16 aa, synthetic construct
  REGION 1..16: note = Synthetic
GTKDSTKDIPETPSKD

SEQ ID NO: 269 - protein, 16 aa, synthetic construct
  REGION 1..16: note = Synthetic
GRDVRQPEVKEEKPES

SEQ ID NO: 270 - protein, 16 aa, synthetic construct
  REGION 1..16: note = Synthetic
EGKSSGSGSESKSTAG

SEQ ID NO: 271 - protein, 16 aa, synthetic construct
  REGION 1..16: note = Synthetic
TPGSPAGSPTSTEEGT

SEQ ID NO: 272 - protein, 16 aa, synthetic construct
  REGION 1..16: note = Synthetic
GSEPATSGSETPGTST

SEQ ID NO: 273-300 - skipped (28 entries)

SEQ ID NO: 301 - RNA, 4136 nt, synthetic construct
  misc_feature 1..4136: note = Synthetic
  source 1..4136: mol_type = other RNA
gggaagctcagaataaacgctcaactttggccggatctgccaccatggaggcctcccccgcctccggcccccggcacctgatggacccccacatcttcacctccaacttcaacaacggcatcggccggcacaagacctacctgtgctacgaggtggagcggctggacaacggcacctccgtgaagatggaccagcaccggggcttcctgcacaaccaggccaagaacctgctgtgcggcttctacggccggcacgccgagctgcggttcctggacctggtgccctccctgcagctggaccccgcccagatctaccgggtgacctggttcatctcctggtccccctgcttctcctggggctgcgccggcgaggtgcgggccttcctgcaggagaacacccacgtgcggctgcggatcttcgccgcccggatctacgactacgaccccctgtacaaggaggccctgcagatgctgcgggacgccggcgcccaggtgtccatcatgacctacgacgagttcaagcactgctgggacaccttcgtggaccaccagggctgccccttccagccctgggacggcctggacgagcactcccaggccctgtccggccggctgcgggccatcctgcagaaccagggcaactccggctccgagacccccggcacctccgagtccgccacccccgagtccgcagcgttcaaaccaaatcccatcaactacatcctgggcctggccatcggcatcgcctccgtgggctgggccatggtggagatcgacgaggaggagaaccccatccggctgatcgacctgggcgtgcgggtgttcgagcgggccgaggtgcccaagaccggcgactccctggccatggcccggcggctggcccggtccgtgcggcggctgacccggcggcgggcccaccggctgctgcgggcccggcggctgctgaagcgggagggcgtgctgcaggccgccgacttcgacgagaacggcctgatcaagtccctgcccaacaccccctggcagctgcgggccgccgccctggaccggaagctgacccccctggagtggtccgccgtgctgctgcacctgatcaagcaccggggctacctgtcccagcggaagaacgagggcgagaccgccgacaaggagctgggcgccctgctgaagggcgtggccaacaacgcccacgccctgcagaccggcgacttccggacccccgccgagctggccctgaacaagttcgagaaggagtccggccacatccggaaccagcggggcgactactcccacaccttctcccggaaggacctgcaggccgagctgatcctgctgttcgagaagcagaaggagttcggcaacccccacgtgtccggcggcctgaaggagggcatcgagaccctgctgatgacccagcggcccgccctgtccggcgacgccgtgcagaagatgctgggccactgcaccttcgagcccgccgagcccaaggccgccaagaacacctacaccgccgagcggttcatctggctgaccaagctgaacaacctgcggatcctggagcagggctccgagcggcccctgaccgacaccgagcgggccaccctgatggacgagccctaccggaagtccaagctgacctacgcccaggcccggaagctgctgggcctggaggacaccgccttcttcaagggcctgcggtacggcaaggacaacgccgaggcctccaccctgatggagatgaaggcctaccacgccatctcccgggccctggagaaggagggcctgaaggacaagaagtcccccctgaacctgtcctccgagctgcaggacgagatcggcaccgccttctccctgttcaagaccgacgaggacatcaccggccggctgaaggaccgggtgcagcccgagatcctggaggccctgctgaagcacatctccttcgacaagttcgtgcagatctccctgaaggccctgcggcggatcgtgcccctgatggagcagggcaagcggtacgacgaggcctgcgccgagatctacggcgaccactacggcaagaagaacaccgaggagaagatctacctgccccccatccccgccgacgagatccggaaccccgtggtgctgcgggccctgtcccaggcccggaaggtgatcaacggcgtggtgcggcggtacggctcccccgcccggatccacatcgagaccgcccgggaggtgggcaagtccttcaaggaccggaaggagatcgagaagcggcaggaggagaaccggaaggaccgggagaaggccgccgccaagttccgggagtacttccccaacttcgtgggcgagcccaagtccaaggacatcctgaagctgcggctgtacgagcagcagcacggcaagtgcctgtactccggcaaggagatcaacctggtgcggctgaacgagaagggctacgtggagatcgaccacgccctgcccttctcccggacctgggacgactccttcaacaacaaggtgctggtgctgggctccgagaaccagaacaagggcaaccagaccccctacgagtacttcaacggcaaggacaactcccgggagtggcaggagttcaaggcccgggtggagacctcccggttcccccggtccaagaagcagcggatcctgctgcagaagttcgacgaggacggcttcaaggagtgcaacctgaacgacacccggtacgtgaaccgcttcctgtgccagttcgtggccgaccacatcctgctgaccggcaagggcaagcggcgggtgttcgcctccaacggccagatcaccaacctgctgcggggcttctggggcctgcggaaggtgcgggccgagaacgaccggcaccacgccctggacgccgtggtggtggcctgctccaccgtggccatgcagcagaagatcacccggttcgtgcggtacaaggagatgaacgccttcgacggcaagaccatcgacaaggagaccggcaaggtgctgcaccagaagacccacttcccccagccctgggagttcttcgcccaggaggtgatgatccgggtgttcggcaagcccgacggcaagcccgagttcgaggaggccgacacccccgagaagctgcggaccctgctggccgagaagctgtcctcccggcccgaggccgtgcacgagtacgtgacccccctgttcgtgtcccgggcccccaaccggaagatgtccggcgcccacaaggacaccctgcggtccgccaagcggttcgtgaagcacaacgagaagatctccgtgaagcgggtgtggctgaccgagatcaagctggccgacctggagaacatggtgaactacaagaacggccgggagatcgagctgtacgaggccctgaaggcccggctggaggcctacggcggcaacgccaagcaggccttcgaccccaaggacaaccccttctacaagaagggcggccagctggtgaaggccgtgcgggtggagaagacccaggagtccggcgtgctgctgaacaagaagaacgcctacaccatcgccgacaacggcgacatggtgcgggtggacgtgttctgcaaggtggacaagaagggcaagaaccagtacttcatcgtgcccatctacgcctggcaggtggccgagaacatcctgcccgacatcgactgcaagggctaccggatcgacgactcctacaccttctgcttctccctgcacaagtacgacctgatcgccttccagaaggacgagaagtccaaggtggagttcgcctactacatcaactgcgactcctccaacggccggttctacctggcctggcacgacaagggctccaaggagcagcagttccggatctccacccagaacctggtgctgatccagaagtaccaggtgaacgagctgggcaaggagatccggccctgccggctgaagaagcggccccccgtgcggtccggaaagcggaccgccgacggctccgagttcgagtcccccaagaagaagcggaaggtggagtagtgactagcaccagcctcaagaacacccgaatggagtctctaagctacataataccaacttacactttacaaaatgttgtcccccaaaatgtagccattcgtatctgctcctaataaaaagaaagtttcttcacattct

SEQ ID NO: 302 - RNA, 3954 nt, synthetic construct
  misc_feature 1..3954: note = Synthetic
  source 1..3954: mol_type = other RNA
atggaggcctcccccgcctccggcccccggcacctgatggacccccacatcttcacctccaacttcaacaacggcatcggccggcacaagacctacctgtgctacgaggtggagcggctggacaacggcacctccgtgaagatggaccagcaccggggcttcctgcacaaccaggccaagaacctgctgtgcggcttctacggccggcacgccgagctgcggttcctggacctggtgccctccctgcagctggaccccgcccagatctaccgggtgacctggttcatctcctggtccccctgcttctcctggggctgcgccggcgaggtgcgggccttcctgcaggagaacacccacgtgcggctgcggatcttcgccgcccggatctacgactacgaccccctgtacaaggaggccctgcagatgctgcgggacgccggcgcccaggtgtccatcatgacctacgacgagttcaagcactgctgggacaccttcgtggaccaccagggctgccccttccagccctgggacggcctggacgagcactcccaggccctgtccggccggctgcgggccatcctgcagaaccagggcaactccggctccgagacccccggcacctccgagtccgccacccccgagtccgcagcgttcaaaccaaatcccatcaactacatcctgggcctggccatcggcatcgcctccgtgggctgggccatggtggagatcgacgaggaggagaaccccatccggctgatcgacctgggcgtgcgggtgttcgagcgggccgaggtgcccaagaccggcgactccctggccatggcccggcggctggcccggtccgtgcggcggctgacccggcggcgggcccaccggctgctgcgggcccggcggctgctgaagcgggagggcgtgctgcaggccgccgacttcgacgagaacggcctgatcaagtccctgcccaacaccccctggcagctgcgggccgccgccctggaccggaagctgacccccctggagtggtccgccgtgctgctgcacctgatcaagcaccggggctacctgtcccagcggaagaacgagggcgagaccgccgacaaggagctgggcgccctgctgaagggcgtggccaacaacgcccacgccctgcagaccggcgacttccggacccccgccgagctggccctgaacaagttcgagaaggagtccggccacatccggaaccagcggggcgactactcccacaccttctcccggaaggacctgcaggccgagctgatcctgctgttcgagaagcagaaggagttcggcaacccccacgtgtccggcggcctgaaggagggcatcgagaccctgctgatgacccagcggcccgccctgtccggcgacgccgtgcagaagatgctgggccactgcaccttcgagcccgccgagcccaaggccgccaagaacacctacaccgccgagcggttcatctggctgaccaagctgaacaacctgcggatcctggagcagggctccgagcggcccctgaccgacaccgagcgggccaccctgatggacgagccctaccggaagtccaagctgacctacgcccaggcccggaagctgctgggcctggaggacaccgccttcttcaagggcctgcggtacggcaaggacaacgccgaggcctccaccctgatggagatgaaggcctaccacgccatctcccgggccctggagaaggagggcctgaaggacaagaagtcccccctgaacctgtcctccgagctgcaggacgagatcggcaccgccttctccctgttcaagaccgacgaggacatcaccggccggctgaaggaccgggtgcagcccgagatcctggaggccctgctgaagcacatctccttcgacaagttcgtgcagatctccctgaaggccctgcggcggatcgtgcccctgatggagcagggcaagcggtacgacgaggcctgcgccgagatctacggcgaccactacggcaagaagaacaccgaggagaagatctacctgccccccatccccgccgacgagatccggaaccccgtggtgctgcgggccctgtcccaggcccggaaggtgatcaacggcgtggtgcggcggtacggctcccccgcccggatccacatcgagaccgcccgggaggtgggcaagtccttcaaggaccggaaggagatcgagaagcggcaggaggagaaccggaaggaccgggagaaggccgccgccaagttccgggagtacttccccaacttcgtgggcgagcccaagtccaaggacatcctgaagctgcggctgtacgagcagcagcacggcaagtgcctgtactccggcaaggagatcaacctggtgcggctgaacgagaagggctacgtggagatcgaccacgccctgcccttctcccggacctgggacgactccttcaacaacaaggtgctggtgctgggctccgagaaccagaacaagggcaaccagaccccctacgagtacttcaacggcaaggacaactcccgggagtggcaggagttcaaggcccgggtggagacctcccggttcccccggtccaagaagcagcggatcctgctgcagaagttcgacgaggacggcttcaaggagtgcaacctgaacgacacccggtacgtgaaccgcttcctgtgccagttcgtggccgaccacatcctgctgaccggcaagggcaagcggcgggtgttcgcctccaacggccagatcaccaacctgctgcggggcttctggggcctgcggaaggtgcgggccgagaacgaccggcaccacgccctggacgccgtggtggtggcctgctccaccgtggccatgcagcagaagatcacccggttcgtgcggtacaaggagatgaacgccttcgacggcaagaccatcgacaaggagaccggcaaggtgctgcaccagaagacccacttcccccagccctgggagttcttcgcccaggaggtgatgatccgggtgttcggcaagcccgacggcaagcccgagttcgaggaggccgacacccccgagaagctgcggaccctgctggccgagaagctgtcctcccggcccgaggccgtgcacgagtacgtgacccccctgttcgtgtcccgggcccccaaccggaagatgtccggcgcccacaaggacaccctgcggtccgccaagcggttcgtgaagcacaacgagaagatctccgtgaagcgggtgtggctgaccgagatcaagctggccgacctggagaacatggtgaactacaagaacggccgggagatcgagctgtacgaggccctgaaggcccggctggaggcctacggcggcaacgccaagcaggccttcgaccccaaggacaaccccttctacaagaagggcggccagctggtgaaggccgtgcgggtggagaagacccaggagtccggcgtgctgctgaacaagaagaacgcctacaccatcgccgacaacggcgacatggtgcgggtggacgtgttctgcaaggtggacaagaagggcaagaaccagtacttcatcgtgcccatctacgcctggcaggtggccgagaacatcctgcccgacatcgactgcaagggctaccggatcgacgactcctacaccttctgcttctccctgcacaagtacgacctgatcgccttccagaaggacgagaagtccaaggtggagttcgcctactacatcaactgcgactcctccaacggccggttctacctggcctggcacgacaagggctccaaggagcagcagttccggatctccacccagaacctggtgctgatccagaagtaccaggtgaacgagctgggcaaggagatccggccctgccggctgaagaagcggccccccgtgcggtccggaaagcggaccgccgacggctccgagttcgagtcccccaagaagaagcggaaggtggagtag

SEQ ID NO: 303 - protein, 1317 aa, synthetic construct
  REGION 1..1317: note = Synthetic
MEASPASGPRHLMDPHIFTSNFNNGIGRHKTYLCYEVERLDNGTSVKMDQHRGFLHNQAKNLLCGFYGRHAELRFLDLVPSLQLDPAQIYRVTWFISWSPCFSWGCAGEVRAFLQENTHVRLRIFAARIYDYDPLYKEALQMLRDAGAQVSIMTYDEFKHCWDTFVDHQGCPFQPWDGLDEHSQALSGRLRAILQNQGNSGSETPGTSESATPESAAFKPNPINYILGLAIGIASVGWAMVEIDEEENPIRLIDLGVRVFERAEVPKTGDSLAMARRLARSVRRLTRRRAHRLLRARRLLKREGVLQAADFDENGLIKSLPNTPWQLRAAALDRKLTPLEWSAVLLHLIKHRGYLSQRKNEGETADKELGALLKGVANNAHALQTGDFRTPAELALNKFEKESGHIRNQRGDYSHTFSRKDLQAELILLFEKQKEFGNPHVSGGLKEGIETLLMTQRPALSGDAVQKMLGHCTFEPAEPKAAKNTYTAERFIWLTKLNNLRILEQGSERPLTDTERATLMDEPYRKSKLTYAQARKLLGLEDTAFFKGLRYGKDNAEASTLMEMKAYHAISRALEKEGLKDKKSPLNLSSELQDEIGTAFSLFKTDEDITGRLKDRVQPEILEALLKHISFDKFVQISLKALRRIVPLMEQGKRYDEACAEIYGDHYGKKNTEEKIYLPPIPADEIRNPVVLRALSQARKVINGVVRRYGSPARIHIETAREVGKSFKDRKEIEKRQEENRKDREKAAAKFREYFPNFVGEPKSKDILKLRLYEQQHGKCLYSGKEINLVRLNEKGYVEIDHALPFSRTWDDSFNNKVLVLGSENQNKGNQTPYEYFNGKDNSREWQEFKARVETSRFPRSKKQRILLQKFDEDGFKECNLNDTRYVNRFLCQFVADHILLTGKGKRRVFASNGQITNLLRGFWGLRKVRAENDRHHALDAVVVACSTVAMQQKITRFVRYKEMNAFDGKTIDKETGKVLHQKTHFPQPWEFFAQEVMIRVFGKPDGKPEFEEADTPEKLRTLLAEKLSSRPEAVHEYVTPLFVSRAPNRKMSGAHKDTLRSAKRFVKHNEKISVKRVWLTEIKLADLENMVNYKNGREIELYEALKARLEAYGGNAKQAFDPKDNPFYKKGGQLVKAVRVEKTQESGVLLNKKNAYTIADNGDMVRVDVFCKVDKKGKNQYFIVPIYAWQVAENILPDIDCKGYRIDDSYTFCFSLHKYDLIAFQKDEKSKVEFAYYINCDSSNGRFYLAWHDKGSKEQQFRISTQNLVLIQKYQVNELGKEIRPCRLKKRPPVRSGKRTADGSEFESPKKKRKVE

SEQ ID NO: 304 - RNA, 4250 nt, synthetic construct
  misc_feature 1..4250: note = Synthetic
  source 1..4250: mol_type = other RNA
gggaagctcagaataaacgctcaactttggccggatctgccaccatggacggctccggcggcggctcccccaagaagaagcggaaggtggaggacaagcggcccgccgccaccaagaaggccggccaggccaagaagaagaagggcggctccggcggcggcgaggcctcccccgcctccggcccccggcacctgatggacccccacatcttcacctccaacttcaacaacggcatcggccggcacaagacctacctgtgctacgaggtggagcggctggacaacggcacctccgtgaagatggaccagcaccggggcttcctgcacaaccaggccaagaacctgctgtgcggcttctacggccggcacgccgagctgcggttcctggacctggtgccctccctgcagctggaccccgcccagatctaccgggtgacctggttcatctcctggtccccctgcttctcctggggctgcgccggcgaggtgcgggccttcctgcaggagaacacccacgtgcggctgcggatcttcgccgcccggatctacgactacgaccccctgtacaaggaggccctgcagatgctgcgggacgccggcgcccaggtgtccatcatgacctacgacgagttcaagcactgctgggacaccttcgtggaccaccagggctgccccttccagccctgggacggcctggacgagcactcccaggccctgtccggccggctgcgggccatcctgcagaaccagggcaactccggctccgagacccccggcacctccgagtccgccacccccgagtccgcagcgttcaaaccaaatcccatcaactacatcctgggcctggccatcggcatcgcctccgtgggctgggccatggtggagatcgacgaggaggagaaccccatccggctgatcgacctgggcgtgcgggtgttcgagcgggccgaggtgcccaagaccggcgactccctggccatggcccggcggctggcccggtccgtgcggcggctgacccggcggcgggcccaccggctgctgcgggcccggcggctgctgaagcgggagggcgtgctgcaggccgccgacttcgacgagaacggcctgatcaagtccctgcccaacaccccctggcagctgcgggccgccgccctggaccggaagctgacccccctggagtggtccgccgtgctgctgcacctgatcaagcaccggggctacctgtcccagcggaagaacgagggcgagaccgccgacaaggagctgggcgccctgctgaagggcgtggccaacaacgcccacgccctgcagaccggcgacttccggacccccgccgagctggccctgaacaagttcgagaaggagtccggccacatccggaaccagcggggcgactactcccacaccttctcccggaaggacctgcaggccgagctgatcctgctgttcgagaagcagaaggagttcggcaacccccacgtgtccggcggcctgaaggagggcatcgagaccctgctgatgacccagcggcccgccctgtccggcgacgccgtgcagaagatgctgggccactgcaccttcgagcccgccgagcccaaggccgccaagaacacctacaccgccgagcggttcatctggctgaccaagctgaacaacctgcggatcctggagcagggctccgagcggcccctgaccgacaccgagcgggccaccctgatggacgagccctaccggaagtccaagctgacctacgcccaggcccggaagctgctgggcctggaggacaccgccttcttcaagggcctgcggtacggcaaggacaacgccgaggcctccaccctgatggagatgaaggcctaccacgccatctcccgggccctggagaaggagggcctgaaggacaagaagtcccccctgaacctgtcctccgagctgcaggacgagatcggcaccgccttctccctgttcaagaccgacgaggacatcaccggccggctgaaggaccgggtgcagcccgagatcctggaggccctgctgaagcacatctccttcgacaagttcgtgcagatctccctgaaggccctgcggcggatcgtgcccctgatggagcagggcaagcggtacgacgaggcctgcgccgagatctacggcgaccactacggcaagaagaacaccgaggagaagatctacctgccccccatccccgccgacgagatccggaaccccgtggtgctgcgggccctgtcccaggcccggaaggtgatcaacggcgtggtgcggcggtacggctcccccgcccggatccacatcgagaccgcccgggaggtgggcaagtccttcaaggaccggaaggagatcgagaagcggcaggaggagaaccggaaggaccgggagaaggccgccgccaagttccgggagtacttccccaacttcgtgggcgagcccaagtccaaggacatcctgaagctgcggctgtacgagcagcagcacggcaagtgcctgtactccggcaaggagatcaacctggtgcggctgaacgagaagggctacgtggagatcgaccacgccctgcccttctcccggacctgggacgactccttcaacaacaaggtgctggtgctgggctccgagaaccagaacaagggcaaccagaccccctacgagtacttcaacggcaaggacaactcccgggagtggcaggagttcaaggcccgggtggagacctcccggttcccccggtccaagaagcagcggatcctgctgcagaagttcgacgaggacggcttcaaggagtgcaacctgaacgacacccggtacgtgaaccgcttcctgtgccagttcgtggccgaccacatcctgctgaccggcaagggcaagcggcgggtgttcgcctccaacggccagatcaccaacctgctgcggggcttctggggcctgcggaaggtgcgggccgagaacgaccggcaccacgccctggacgccgtggtggtggcctgctccaccgtggccatgcagcagaagatcacccggttcgtgcggtacaaggagatgaacgccttcgacggcaagaccatcgacaaggagaccggcaaggtgctgcaccagaagacccacttcccccagccctgggagttcttcgcccaggaggtgatgatccgggtgttcggcaagcccgacggcaagcccgagttcgaggaggccgacacccccgagaagctgcggaccctgctggccgagaagctgtcctcccggcccgaggccgtgcacgagtacgtgacccccctgttcgtgtcccgggcccccaaccggaagatgtccggcgcccacaaggacaccctgcggtccgccaagcggttcgtgaagcacaacgagaagatctccgtgaagcgggtgtggctgaccgagatcaagctggccgacctggagaacatggtgaactacaagaacggccgggagatcgagctgtacgaggccctgaaggcccggctggaggcctacggcggcaacgccaagcaggccttcgaccccaaggacaaccccttctacaagaagggcggccagctggtgaaggccgtgcgggtggagaagacccaggagtccggcgtgctgctgaacaagaagaacgcctacaccatcgccgacaacggcgacatggtgcgggtggacgtgttctgcaaggtggacaagaagggcaagaaccagtacttcatcgtgcccatctacgcctggcaggtggccgagaacatcctgcccgacatcgactgcaagggctaccggatcgacgactcctacaccttctgcttctccctgcacaagtacgacctgatcgccttccagaaggacgagaagtccaaggtggagttcgcctactacatcaactgcgactcctccaacggccggttctacctggcctggcacgacaagggctccaaggagcagcagttccggatctccacccagaacctggtgctgatccagaagtaccaggtgaacgagctgggcaaggagatccggccctgccggctgaagaagcggccccccgtgcggtccggaaagcggaccgccgacggctccgagttcgagtcccccaagaagaagcggaaggtggagtagtgactagcaccagcctcaagaacacccgaatggagtctctaagctacataataccaacttacactttacaaaatgttgtcccccaaaatgtagccattcgtatctgctcctaataaaaagaaagtttcttcacattct

SEQ ID NO: 305 - RNA, 4068 nt, synthetic construct
  misc_feature 1..4068: note = Synthetic
  source 1..4068: mol_type = other RNA
atggacggctccggcggcggctcccccaagaagaagcggaaggtggaggacaagcggcccgccgccaccaagaaggccggccaggccaagaagaagaagggcggctccggcggcggcgaggcctcccccgcctccggcccccggcacctgatggacccccacatcttcacctccaacttcaacaacggcatcggccggcacaagacctacctgtgctacgaggtggagcggctggacaacggcacctccgtgaagatggaccagcaccggggcttcctgcacaaccaggccaagaacctgctgtgcggcttctacggccggcacgccgagctgcggttcctggacctggtgccctccctgcagctggaccccgcccagatctaccgggtgacctggttcatctcctggtccccctgcttctcctggggctgcgccggcgaggtgcgggccttcctgcaggagaacacccacgtgcggctgcggatcttcgccgcccggatctacgactacgaccccctgtacaaggaggccctgcagatgctgcgggacgccggcgcccaggtgtccatcatgacctacgacgagttcaagcactgctgggacaccttcgtggaccaccagggctgccccttccagccctgggacggcctggacgagcactcccaggccctgtccggccggctgcgggccatcctgcagaaccagggcaactccggctccgagacccccggcacctccgagtccgccacccccgagtccgcagcgttcaaaccaaatcccatcaactacatcctgggcctggccatcggcatcgcctccgtgggctgggccatggtggagatcgacgaggaggagaaccccatccggctgatcgacctgggcgtgcgggtgttcgagcgggccgaggtgcccaagaccggcgactccctggccatggcccggcggctggcccggtccgtgcggcggctgacccggcggcgggcccaccggctgctgcgggcccggcggctgctgaagcgggagggcgtgctgcaggccgccgacttcgacgagaacggcctgatcaagtccctgcccaacaccccctggcagctgcgggccgccgccctggaccggaagctgacccccctggagtggtccgccgtgctgctgcacctgatcaagcaccggggctacctgtcccagcggaagaacgagggcgagaccgccgacaaggagctgggcgccctgctgaagggcgtggccaacaacgcccacgccctgcagaccggcgacttccggacccccgccgagctggccctgaacaagttcgagaaggagtccggccacatccggaaccagcggggcgactactcccacaccttctcccggaaggacctgcaggccgagctgatcctgctgttcgagaagcagaaggagttcggcaacccccacgtgtccggcggcctgaaggagggcatcgagaccctgctgatgacccagcggcccgccctgtccggcgacgccgtgcagaagatgctgggccactgcaccttcgagcccgccgagcccaaggccgccaagaacacctacaccgccgagcggttcatctggctgaccaagctgaacaacctgcggatcctggagcagggctccgagcggcccctgaccgacaccgagcgggccaccctgatggacgagccctaccggaagtccaagctgacctacgcccaggcccggaagctgctgggcctggaggacaccgccttcttcaagggcctgcggtacggcaaggacaacgccgaggcctccaccctgatggagatgaaggcctaccacgccatctcccgggccctggagaaggagggcctgaaggacaagaagtcccccctgaacctgtcctccgagctgcaggacgagatcggcaccgccttctccctgttcaagaccgacgaggacatcaccggccggctgaaggaccgggtgcagcccgagatcctggaggccctgctgaagcacatctccttcgacaagttcgtgcagatctccctgaaggccctgcggcggatcgtgcccctgatggagcagggcaagcggtacgacgaggcctgcgccgagatctacggcgaccactacggcaagaagaacaccgaggagaagatctacctgccccccatccccgccgacgagatccggaaccccgtggtgctgcgggccctgtcccaggcccggaaggtgatcaacggcgtggtgcggcggtacggctcccccgcccggatccacatcgagaccgcccgggaggtgggcaagtccttcaaggaccggaaggagatcgagaagcggcaggaggagaaccggaaggaccgggagaaggccgccgccaagttccgggagtacttccccaacttcgtgggcgagcccaagtccaaggacatcctgaagctgcggctgtacgagcagcagcacggcaagtgcctgtactccggcaaggagatcaacctggtgcggctgaacgagaagggctacgtggagatcgaccacgccctgcccttctcccggacctgggacgactccttcaacaacaaggtgctggtgctgggctccgagaaccagaacaagggcaaccagaccccctacgagtacttcaacggcaaggacaactcccgggagtggcaggagttcaaggcccgggtggagacctcccggttcccccggtccaagaagcagcggatcctgctgcagaagttcgacgaggacggcttcaaggagtgcaacctgaacgacacccggtacgtgaaccgcttcctgtgccagttcgtggccgaccacatcctgctgaccggcaagggcaagcggcgggtgttcgcctccaacggccagatcaccaacctgctgcggggcttctggggcctgcggaaggtgcgggccgagaacgaccggcaccacgccctggacgccgtggtggtggcctgctccaccgtggccatgcagcagaagatcacccggttcgtgcggtacaaggagatgaacgccttcgacggcaagaccatcgacaaggagaccggcaaggtgctgcaccagaagacccacttcccccagccctgggagttcttcgcccaggaggtgatgatccgggtgttcggcaagcccgacggcaagcccgagttcgaggaggccgacacccccgagaagctgcggaccctgctggccgagaagctgtcctcccggcccgaggccgtgcacgagtacgtgacccccctgttcgtgtcccgggcccccaaccggaagatgtccggcgcccacaaggacaccctgcggtccgccaagcggttcgtgaagcacaacgagaagatctccgtgaagcgggtgtggctgaccgagatcaagctggccgacctggagaacatggtgaactacaagaacggccgggagatcgagctgtacgaggccctgaaggcccggctggaggcctacggcggcaacgccaagcaggccttcgaccccaaggacaaccccttctacaagaagggcggccagctggtgaaggccgtgcgggtggagaagacccaggagtccggcgtgctgctgaacaagaagaacgcctacaccatcgccgacaacggcgacatggtgcgggtggacgtgttctgcaaggtggacaagaagggcaagaaccagtacttcatcgtgcccatctacgcctggcaggtggccgagaacatcctgcccgacatcgactgcaagggctaccggatcgacgactcctacaccttctgcttctccctgcacaagtacgacctgatcgccttccagaaggacgagaagtccaaggtggagttcgcctactacatcaactgcgactcctccaacggccggttctacctggcctggcacgacaagggctccaaggagcagcagttccggatctccacccagaacctggtgctgatccagaagtaccaggtgaacgagctgggcaaggagatccggccctgccggctgaagaagcggccccccgtgcggtccggaaagcggaccgccgacggctccgagttcgagtcccccaagaagaagcggaaggtggagtag

SEQ ID NO: 306 - protein, 1355 aa, synthetic construct
  REGION 1..1355: note = Synthetic
MDGSGGGSPKKKRKVEDKRPAATKKAGQAKKKKGGSGGGEASPASGPRHLMDPHIFTSNFNNGIGRHKTYLCYEVERLDNGTSVKMDQHRGFLHNQAKNLLCGFYGRHAELRFLDLVPSLQLDPAQIYRVTWFISWSPCFSWGCAGEVRAFLQENTHVRLRIFAARIYDYDPLYKEALQMLRDAGAQVSIMTYDEFKHCWDTFVDHQGCPFQPWDGLDEHSQALSGRLRAILQNQGNSGSETPGTSESATPESAAFKPNPINYILGLAIGIASVGWAMVEIDEEENPIRLIDLGVRVFERAEVPKTGDSLAMARRLARSVRRLTRRRAHRLLRARRLLKREGVLQAADFDENGLIKSLPNTPWQLRAAALDRKLTPLEWSAVLLHLIKHRGYLSQRKNEGETADKELGALLKGVANNAHALQTGDFRTPAELALNKFEKESGHIRNQRGDYSHTFSRKDLQAELILLFEKQKEFGNPHVSGGLKEGIETLLMTQRPALSGDAVQKMLGHCTFEPAEPKAAKNTYTAERFIWLTKLNNLRILEQGSERPLTDTERATLMDEPYRKSKLTYAQARKLLGLEDTAFFKGLRYGKDNAEASTLMEMKAYHAISRALEKEGLKDKKSPLNLSSELQDEIGTAFSLFKTDEDITGRLKDRVQPEILEALLKHISFDKFVQISLKALRRIVPLMEQGKRYDEACAEIYGDHYGKKNTEEKIYLPPIPADEIRNPVVLRALSQARKVINGVVRRYGSPARIHIETAREVGKSFKDRKEIEKRQEENRKDREKAAAKFREYFPNFVGEPKSKDILKLRLYEQQHGKCLYSGKEINLVRLNEKGYVEIDHALPFSRTWDDSFNNKVLVLGSENQNKGNQTPYEYFNGKDNSREWQEFKARVETSRFPRSKKQRILLQKFDEDGFKECNLNDTRYVNRFLCQFVADHILLTGKGKRRVFASNGQITNLLRGFWGLRKVRAENDRHHALDAVVVACSTVAMQQKITRFVRYKEMNAFDGKTIDKETGKVLHQKTHFPQPWEFFAQEVMIRVFGKPDGKPEFEEADTPEKLRTLLAEKLSSRPEAVHEYVTPLFVSRAPNRKMSGAHKDTLRSAKRFVKHNEKISVKRVWLTEIKLADLENMVNYKNGREIELYEALKARLEAYGGNAKQAFDPKDNPFYKKGGQLVKAVRVEKTQESGVLLNKKNAYTIADNGDMVRVDVFCKVDKKGKNQYFIVPIYAWQVAENILPDIDCKGYRIDDSYTFCFSLHKYDLIAFQKDEKSKVEFAYYINCDSSNGRFYLAWHDKGSKEQQFRISTQNLVLIQKYQVNELGKEIRPCRLKKRPPVRSGKRTADGSEFESPKKKRKVE

SEQ ID NO: 307 - RNA, 4368 nt, synthetic construct
  misc_feature 1..4368: note = Synthetic
  source 1..4368: mol_type = other RNA
gggaagctcagaataaacgctcaactttggccggatctgccaccatggacggctccggcggcggctcccccaagaagaagcggaaggtggaggacaagcggcccgccgccaccaagaaggccggccaggccaagaagaagaagggcggctccggcggcggcgaggcctcccccgcctccggcccccggcacctgatggacccccacatcttcacctccaacttcaacaacggcatcggccggcacaagacctacctgtgctacgaggtggagcggctggacaacggcacctccgtgaagatggaccagcaccggggcttcctgcacaaccaggccaagaacctgctgtgcggcttctacggccggcacgccgagctgcggttcctggacctggtgccctccctgcagctggaccccgcccagatctaccgggtgacctggttcatctcctggtccccctgcttctcctggggctgcgccggcgaggtgcgggccttcctgcaggagaacacccacgtgcggctgcggatcttcgccgcccggatctacgactacgaccccctgtacaaggaggccctgcagatgctgcgggacgccggcgcccaggtgtccatcatgacctacgacgagttcaagcactgctgggacaccttcgtggaccaccagggctgccccttccagccctgggacggcctggacgagcactcccaggccctgtccggccggctgcgggccatcctgcagaaccagggcaactccggctccgagacccccggcacctccgagtccgccacccccgagtccgcagcgttcaaaccaaatcccatcaactacatcctgggcctggccatcggcatcgcctccgtgggctgggccatggtggagatcgacgaggaggagaaccccatccggctgatcgacctgggcgtgcgggtgttcgagcgggccgaggtgcccaagaccggcgactccctggccatggcccggcggctggcccggtccgtgcggcggctgacccggcggcgggcccaccggctgctgcgggcccggcggctgctgaagcgggagggcgtgctgcaggccgccgacttcgacgagaacggcctgatcaagtccctgcccaacaccccctggcagctgcgggccgccgccctggaccggaagctgacccccctggagtggtccgccgtgctgctgcacctgatcaagcaccggggctacctgtcccagcggaagaacgagggcgagaccgccgacaaggagctgggcgccctgctgaagggcgtggccaacaacgcccacgccctgcagaccggcgacttccggacccccgccgagctggccctgaacaagttcgagaaggagtccggccacatccggaaccagcggggcgactactcccacaccttctcccggaaggacctgcaggccgagctgatcctgctgttcgagaagcagaaggagttcggcaacccccacgtgtccggcggcctgaaggagggcatcgagaccctgctgatgacccagcggcccgccctgtccggcgacgccgtgcagaagatgctgggccactgcaccttcgagcccgccgagcccaaggccgccaagaacacctacaccgccgagcggttcatctggctgaccaagctgaacaacctgcggatcctggagcagggctccgagcggcccctgaccgacaccgagcgggccaccctgatggacgagccctaccggaagtccaagctgacctacgcccaggcccggaagctgctgggcctggaggacaccgccttcttcaagggcctgcggtacggcaaggacaacgccgaggcctccaccctgatggagatgaaggcctaccacgccatctcccgggccctggagaaggagggcctgaaggacaagaagtcccccctgaacctgtcctccgagctgcaggacgagatcggcaccgccttctccctgttcaagaccgacgaggacatcaccggccggctgaaggaccgggtgcagcccgagatcctggaggccctgctgaagcacatctccttcgacaagttcgtgcagatctccctgaaggccctgcggcggatcgtgcccctgatggagcagggcaagcggtacgacgaggcctgcgccgagatctacggcgaccactacggcaagaagaacaccgaggagaagatctacctgccccccatccccgccgacgagatccggaaccccgtggtgctgcgggccctgtcccaggcccggaaggtgatcaacggcgtggtgcggcggtacggctcccccgcccggatccacatcgagaccgcccgggaggtgggcaagtccttcaaggaccggaaggagatcgagaagcggcaggaggagaaccggaaggaccgggagaaggccgccgccaagttccgggagtacttccccaacttcgtgggcgagcccaagtccaaggacatcctgaagctgcggctgtacgagcagcagcacggcaagtgcctgtactccggcaaggagatcaacctggtgcggctgaacgagaagggctacgtggagatcgaccacgccctgcccttctcccggacctgggacgactccttcaacaacaaggtgctggtgctgggctccgagaaccagaacaagggcaaccagaccccctacgagtacttcaacggcaaggacaactcccgggagtggcaggagttcaaggcccgggtggagacctcccggttcccccggtccaagaagcagcggatcctgctgcagaagttcgacgaggacggcttcaaggagtgcaacctgaacgacacccggtacgtgaaccgcttcctgtgccagttcgtggccgaccacatcctgctgaccggcaagggcaagcggcgggtgttcgcctccaacggccagatcaccaacctgctgcggggcttctggggcctgcggaaggtgcgggccgagaacgaccggcaccacgccctggacgccgtggtggtggcctgctccaccgtggccatgcagcagaagatcacccggttcgtgcggtacaaggagatgaacgccttcgacggcaagaccatcgacaaggagaccggcaaggtgctgcaccagaagacccacttcccccagccctgggagttcttcgcccaggaggtgatgatccgggtgttcggcaagcccgacggcaagcccgagttcgaggaggccgacacccccgagaagctgcggaccctgctggccgagaagctgtcctcccggcccgaggccgtgcacgagtacgtgacccccctgttcgtgtcccgggcccccaaccggaagatgtccggcgcccacaaggacaccctgcggtccgccaagcggttcgtgaagcacaacgagaagatctccgtgaagcgggtgtggctgaccgagatcaagctggccgacctggagaacatggtgaactacaagaacggccgggagatcgagctgtacgaggccctgaaggcccggctggaggcctacggcggcaacgccaagcaggccttcgaccccaaggacaaccccttctacaagaagggcggccagctggtgaaggccgtgcgggtggagaagacccaggagtccggcgtgctgctgaacaagaagaacgcctacaccatcgccgacaacggcgacatggtgcgggtggacgtgttctgcaaggtggacaagaagggcaagaaccagtacttcatcgtgcccatctacgcctggcaggtggccgagaacatcctgcccgacatcgactgcaagggctaccggatcgacgactcctacaccttctgcttctccctgcacaagtacgacctgatcgccttccagaaggacgagaagtccaaggtggagttcgcctactacatcaactgcgactcctccaacggccggttctacctggcctggcacgacaagggctccaaggagcagcagttccggatctccacccagaacctggtgctgatccagaagtaccaggtgaacgagctgggcaaggagatccggccctgccggctgaagaagcggccccccgtgcgggaggacaagcggcccgccgccaccaagaaggccggccaggccaagaagaagaagtacccctacgacgtgcccgactacgccggctacccctacgacgtgcccgactacgccggctcctacccctacgacgtgcccgactacgccgccgcccccgccgccaagaagaagaagctggactagctagtgactagcaccagcctcaagaacacccgaatggagtctctaagctacataataccaacttacactttacaaaatgttgtcccccaaaatgtagccattcgtatctgctcctaataaaaagaaagtttcttcacattct

SEQ ID NO: 308 - RNA, 4180 nt, synthetic construct
  misc_feature 1..4180: note = Synthetic
  source 1..4180: mol_type = other RNA
atggacggctccggcggcggctcccccaagaagaagcggaaggtggaggacaagcggcccgccgccaccaagaaggccggccaggccaagaagaagaagggcggctccggcggcggcgaggcctcccccgcctccggcccccggcacctgatggacccccacatcttcacctccaacttcaacaacggcatcggccggcacaagacctacctgtgctacgaggtggagcggctggacaacggcacctccgtgaagatggaccagcaccggggcttcctgcacaaccaggccaagaacctgctgtgcggcttctacggccggcacgccgagctgcggttcctggacctggtgccctccctgcagctggaccccgcccagatctaccgggtgacctggttcatctcctggtccccctgcttctcctggggctgcgccggcgaggtgcgggccttcctgcaggagaacacccacgtgcggctgcggatcttcgccgcccggatctacgactacgaccccctgtacaaggaggccctgcagatgctgcgggacgccggcgcccaggtgtccatcatgacctacgacgagttcaagcactgctgggacaccttcgtggaccaccagggctgccccttccagccctgggacggcctggacgagcactcccaggccctgtccggccggctgcgggccatcctgcagaaccagggcaactccggctccgagacccccggcacctccgagtccgccacccccgagtccgcagcgttcaaaccaaatcccatcaactacatcctgggcctggccatcggcatcgcctccgtgggctgggccatggtggagatcgacgaggaggagaaccccatccggctgatcgacctgggcgtgcgggtgttcgagcgggccgaggtgcccaagaccggcgactccctggccatggcccggcggctggcccggtccgtgcggcggctgacccggcggcgggcccaccggctgctgcgggcccggcggctgctgaagcgggagggcgtgctgcaggccgccgacttcgacgagaacggcctgatcaagtccctgcccaacaccccctggcagctgcgggccgccgccctggaccggaagctgacccccctggagtggtccgccgtgctgctgcacctgatcaagcaccggggctacctgtcccagcggaagaacgagggcgagaccgccgacaaggagctgggcgccctgctgaagggcgtggccaacaacgcccacgccctgcagaccggcgacttccggacccccgccgagctggccctgaacaagttcgagaaggagtccggccacatccggaaccagcggggcgactactcccacaccttctcccggaaggacctgcaggccgagctgatcctgctgttcgagaagcagaaggagttcggcaacccccacgtgtccggcggcctgaaggagggcatcgagaccctgctgatgacccagcggcccgccctgtccggcgacgccgtgcagaagatgctgggccactgcaccttcgagcccgccgagcccaaggccgccaagaacacctacaccgccgagcggttcatctggctgaccaagctgaacaacctgcggatcctggagcagggctccgagcggcccctgaccgacaccgagcgggccaccctgatggacgagccctaccggaagtccaagctgacctacgcccaggcccggaagctgctgggcctggaggacaccgccttcttcaagggcctgcggtacggcaaggacaacgccgaggcctccaccctgatggagatgaaggcctaccacgccatctcccgggccctggagaaggagggcctgaaggacaagaagtcccccctgaacctgtcctccgagctgcaggacgagatcggcaccgccttctccctgttcaagaccgacgaggacatcaccggccggctgaaggaccgggtgcagcccgagatcctggaggccctgctgaagcacatctccttcgacaagttcgtgcagatctccctgaaggccctgcggcggatcgtgcccctgatggagcagggcaagcggtacgacgaggcctgcgccgagatctacggcgaccactacggcaagaagaacaccgaggagaagatctacctgccccccatccccgccgacgagatccggaaccccgtggtgctgcgggccctgtcccaggcccggaaggtgatcaacggcgtggtgcggcggtacggctcccccgcccggatccacatcgagaccgcccgggaggtgggcaagtccttcaaggaccggaaggagatcgagaagcggcaggaggagaaccggaaggaccgggagaaggccgccgccaagttccgggagtacttccccaacttcgtgggcgagcccaagtccaaggacatcctgaagctgcggctgtacgagcagcagcacggcaagtgcctgtactccggcaaggagatcaacctggtgcggctgaacgagaagggctacgtggagatcgaccacgccctgcccttctcccggacctgggacgactccttcaacaacaaggtgctggtgctgggctccgagaaccagaacaagggcaaccagaccccctacgagtacttcaacggcaaggacaactcccgggagtggcaggagttcaaggcccgggtggagacctcccggttcccccggtccaagaagcagcggatcctgctgcagaagttcgacgaggacggcttcaaggagtgcaacctgaacgacacccggtacgtgaaccgcttcctgtgccagttcgtggccgaccacatcctgctgaccggcaagggcaagcggcgggtgttcgcctccaacggccagatcaccaacctgctgcggggcttctggggcctgcggaaggtgcgggccgagaacgaccggcaccacgccctggacgccgtggtggtggcctgctccaccgtggccatgcagcagaagatcacccggttcgtgcggtacaaggagatgaacgccttcgacggcaagaccatcgacaaggagaccggcaaggtgctgcaccagaagacccacttcccccagccctgggagttcttcgcccaggaggtgatgatccgggtgttcggcaagcccgacggcaagcccgagttcgaggaggccgacacccccgagaagctgcggaccctgctggccgagaagctgtcctcccggcccgaggccgtgcacgagtacgtgacccccctgttcgtgtcccgggcccccaaccggaagatgtccggcgcccacaaggacaccctgcggtccgccaagcggttcgtgaagcacaacgagaagatctccgtgaagcgggtgtggctgaccgagatcaagctggccgacctggagaacatggtgaactacaagaacggccgggagatcgagctgtacgaggccctgaaggcccggctggaggcctacggcggcaacgccaagcaggccttcgaccccaaggacaaccccttctacaagaagggcggccagctggtgaaggccgtgcgggtggagaagacccaggagtccggcgtgctgctgaacaagaagaacgcctacaccatcgccgacaacggcgacatggtgcgggtggacgtgttctgcaaggtggacaagaagggcaagaaccagtacttcatcgtgcccatctacgcctggcaggtggccgagaacatcctgcccgacatcgactgcaagggctaccggatcgacgactcctacaccttctgcttctccctgcacaagtacgacctgatcgccttccagaaggacgagaagtccaaggtggagttcgcctactacatcaactgcgactcctccaacggccggttctacctggcctggcacgacaagggctccaaggagcagcagttccggatctccacccagaacctggtgctgatccagaagtaccaggtgaacgagctgggcaaggagatccggccctgccggctgaagaagcggccccccgtgcgggaggacaagcggcccgccgccaccaagaaggccggccaggccaagaagaagaagtacccctacgacgtgcccgactacgccggctacccctacgacgtgcccgactacgccggctcctacccctacgacgtgcccgactacgccgccgcccccgccgccaagaagaagaagctggact

SEQ ID NO: 309 - protein, 1393 aa, synthetic construct
  REGION 1..1393: note = Synthetic
MDGSGGGSPKKKRKVEDKRPAATKKAGQAKKKKGGSGGGEASPASGPRHLMDPHIFTSNFNNGIGRHKTYLCYEVERLDNGTSVKMDQHRGFLHNQAKNLLCGFYGRHAELRFLDLVPSLQLDPAQIYRVTWFISWSPCFSWGCAGEVRAFLQENTHVRLRIFAARIYDYDPLYKEALQMLRDAGAQVSIMTYDEFKHCWDTFVDHQGCPFQPWDGLDEHSQALSGRLRAILQNQGNSGSETPGTSESATPESAAFKPNPINYILGLAIGIASVGWAMVEIDEEENPIRLIDLGVRVFERAEVPKTGDSLAMARRLARSVRRLTRRRAHRLLRARRLLKREGVLQAADFDENGLIKSLPNTPWQLRAAALDRKLTPLEWSAVLLHLIKHRGYLSQRKNEGETADKELGALLKGVANNAHALQTGDFRTPAELALNKFEKESGHIRNQRGDYSHTFSRKDLQAELILLFEKQKEFGNPHVSGGLKEGIETLLMTQRPALSGDAVQKMLGHCTFEPAEPKAAKNTYTAERFIWLTKLNNLRILEQGSERPLTDTERATLMDEPYRKSKLTYAQARKLLGLEDTAFFKGLRYGKDNAEASTLMEMKAYHAISRALEKEGLKDKKSPLNLSSELQDEIGTAFSLFKTDEDITGRLKDRVQPEILEALLKHISFDKFVQISLKALRRIVPLMEQGKRYDEACAEIYGDHYGKKNTEEKIYLPPIPADEIRNPVVLRALSQARKVINGVVRRYGSPARIHIETAREVGKSFKDRKEIEKRQEENRKDREKAAAKFREYFPNFVGEPKSKDILKLRLYEQQHGKCLYSGKEINLVRLNEKGYVEIDHALPFSRTWDDSFNNKVLVLGSENQNKGNQTPYEYFNGKDNSREWQEFKARVETSRFPRSKKQRILLQKFDEDGFKECNLNDTRYVNRFLCQFVADHILLTGKGKRRVFASNGQITNLLRGFWGLRKVRAENDRHHALDAVVVACSTVAMQQKITRFVRYKEMNAFDGKTIDKETGKVLHQKTHFPQPWEFFAQEVMIRVFGKPDGKPEFEEADTPEKLRTLLAEKLSSRPEAVHEYVTPLFVSRAPNRKMSGAHKDTLRSAKRFVKHNEKISVKRVWLTEIKLADLENMVNYKNGREIELYEALKARLEAYGGNAKQAFDPKDNPFYKKGGQLVKAVRVEKTQESGVLLNKKNAYTIADNGDMVRVDVFCKVDKKGKNQYFIVPIYAWQVAENILPDIDCKGYRIDDSYTFCFSLHKYDLIAFQKDEKSKVEFAYYINCDSSNGRFYLAWHDKGSKEQQFRISTQNLVLIQKYQVNELGKEIRPCRLKKRPPVREDKRPAATKKAGQAKKKKYPYDVPDYAGYPYDVPDYAGSYPYDVPDYAAAPAAKKKKLD

SEQ ID NO: 310 - RNA, 4187 nt, synthetic construct
  misc_feature 1..4187: note = Synthetic
  source 1..4187: mol_type = other RNA
gggaagctcagaataaacgctcaactttggccggatctgccaccatggacggctccggcggcggctcccccaagaagaagcggaaggtggaggacaagcggcccgccgccaccaagaaggccggccaggccaagaagaagaagggcggctccggcggcggcgaggcctcccccgcctccggcccccggcacctgatggacccccacatcttcacctccaacttcaacaacggcatcggccggcacaagacctacctgtgctacgaggtggagcggctggacaacggcacctccgtgaagatggaccagcaccggggcttcctgcacaaccaggccaagaacctgctgtgcggcttctacggccggcacgccgagctgcggttcctggacctggtgccctccctgcagctggaccccgcccagatctaccgggtgacctggttcatctcctggtccccctgcttctcctggggctgcgccggcgaggtgcgggccttcctgcaggagaacacccacgtgcggctgcggatcttcgccgcccggatctacgactacgaccccctgtacaaggaggccctgcagatgctgcgggacgccggcgcccaggtgtccatcatgacctacgacgagttcaagcactgctgggacaccttcgtggaccaccagggctgccccttccagccctgggacggcctggacgagcactcccaggccctgtccggccggctgcgggccatcctgcagaaccagggcaactccggctccgagacccccggcacctccgagtccgccacccccgagtccgcagcgttcaaaccaaatcccatcaactacatcctgggcctggccatcggcatcgcctccgtgggctgggccatggtggagatcgacgaggaggagaaccccatccggctgatcgacctgggcgtgcgggtgttcgagcgggccgaggtgcccaagaccggcgactccctggccatggcccggcggctggcccggtccgtgcggcggctgacccggcggcgggcccaccggctgctgcgggcccggcggctgctgaagcgggagggcgtgctgcaggccgccgacttcgacgagaacggcctgatcaagtccctgcccaacaccccctggcagctgcgggccgccgccctggaccggaagctgacccccctggagtggtccgccgtgctgctgcacctgatcaagcaccggggctacctgtcccagcggaagaacgagggcgagaccgccgacaaggagctgggcgccctgctgaagggcgtggccaacaacgcccacgccctgcagaccggcgacttccggacccccgccgagctggccctgaacaagttcgagaaggagtccggccacatccggaaccagcggggcgactactcccacaccttctcccggaaggacctgcaggccgagctgatcctgctgttcgagaagcagaaggagttcggcaacccccacgtgtccggcggcctgaaggagggcatcgagaccctgctgatgacccagcggcccgccctgtccggcgacgccgtgcagaagatgctgggccactgcaccttcgagcccgccgagcccaaggccgccaagaacacctacaccgccgagcggttcatctggctgaccaagctgaacaacctgcggatcctggagcagggctccgagcggcccctgaccgacaccgagcgggccaccctgatggacgagccctaccggaagtccaagctgacctacgcccaggcccggaagctgctgggcctggaggacaccgccttcttcaagggcctgcggtacggcaaggacaacgccgaggcctccaccctgatggagatgaaggcctaccacgccatctcccgggccctggagaaggagggcctgaaggacaagaagtcccccctgaacctgtcctccgagctgcaggacgagatcggcaccgccttctccctgttcaagaccgacgaggacatcaccggccggctgaaggaccgggtgcagcccgagatcctggaggccctgctgaagcacatctccttcgacaagttcgtgcagatctccctgaaggccctgcggcggatcgtgcccctgatggagcagggcaagcggtacgacgaggcctgcgccgagatctacggcgaccactacggcaagaagaacaccgaggagaagatctacctgccccccatccccgccgacgagatccggaaccccgtggtgctgcgggccctgtcccaggcccggaaggtgatcaacggcgtggtgcggcggtacggctcccccgcccggatccacatcgagaccgcccgggaggtgggcaagtccttcaaggaccggaaggagatcgagaagcggcaggaggagaaccggaaggaccgggagaaggccgccgccaagttccgggagtacttccccaacttcgtgggcgagcccaagtccaaggacatcctgaagctgcggctgtacgagcagcagcacggcaagtgcctgtactccggcaaggagatcaacctggtgcggctgaacgagaagggctacgtggagatcgaccacgccctgcccttctcccggacctgggacgactccttcaacaacaaggtgctggtgctgggctccgagaaccagaacaagggcaaccagaccccctacgagtacttcaacggcaaggacaactcccgggagtggcaggagttcaaggcccgggtggagacctcccggttcccccggtccaagaagcagcggatcctgctgcagaagttcgacgaggacggcttcaaggagtgcaacctgaacgacacccggtacgtgaaccgcttcctgtgccagttcgtggccgaccacatcctgctgaccggcaagggcaagcggcgggtgttcgcctccaacggccagatcaccaacctgctgcggggcttctggggcctgcggaaggtgcgggccgagaacgaccggcaccacgccctggacgccgtggtggtggcctgctccaccgtggccatgcagcagaagatcacccggttcgtgcggtacaaggagatgaacgccttcgacggcaagaccatcgacaaggagaccggcaaggtgctgcaccagaagacccacttcccccagccctgggagttcttcgcccaggaggtgatgatccgggtgttcggcaagcccgacggcaagcccgagttcgaggaggccgacacccccgagaagctgcggaccctgctggccgagaagctgtcctcccggcccgaggccgtgcacgagtacgtgacccccctgttcgtgtcccgggcccccaaccggaagatgtccggcgcccacaaggacaccctgcggtccgccaagcggttcgtgaagcacaacgagaagatctccgtgaagcgggtgtggctgaccgagatcaagctggccgacctggagaacatggtgaactacaagaacggccgggagatcgagctgtacgaggccctgaaggcccggctggaggcctacggcggcaacgccaagcaggccttcgaccccaaggacaaccccttctacaagaagggcggccagctggtgaaggccgtgcgggtggagaagacccaggagtccggcgtgctgctgaacaagaagaacgcctacaccatcgccgacaacggcgacatggtgcgggtggacgtgttctgcaaggtggacaagaagggcaagaaccagtacttcatcgtgcccatctacgcctggcaggtggccgagaacatcctgcccgacatcgactgcaagggctaccggatcgacgactcctacaccttctgcttctccctgcacaagtacgacctgatcgccttccagaaggacgagaagtccaaggtggagttcgcctactacatcaactgcgactcctccaacggccggttctacctggcctggcacgacaagggctccaaggagcagcagttccggatctccacccagaacctggtgctgatccagaagtaccaggtgaacgagctgggcaaggagatccggccctgccggctgaagaagcggccccccgtgcggtagtgactagcaccagcctcaagaacacccgaatggagtctctaagctacataataccaacttacactttacaaaatgttgtcccccaaaatgtagccattcgtatctgctcctaataaaaagaaagtttcttcacattct

SEQ ID NO: 311 - RNA, 4005 nt, synthetic construct
  misc_feature 1..4005: note = Synthetic
  source 1..4005: mol_type = other RNA
atggacggctccggcggcggctcccccaagaagaagcggaaggtggaggacaagcggcccgccgccaccaagaaggccggccaggccaagaagaagaagggcggctccggcggcggcgaggcctcccccgcctccggcccccggcacctgatggacccccacatcttcacctccaacttcaacaacggcatcggccggcacaagacctacctgtgctacgaggtggagcggctggacaacggcacctccgtgaagatggaccagcaccggggcttcctgcacaaccaggccaagaacctgctgtgcggcttctacggccggcacgccgagctgcggttcctggacctggtgccctccctgcagctggaccccgcccagatctaccgggtgacctggttcatctcctggtccccctgcttctcctggggctgcgccggcgaggtgcgggccttcctgcaggagaacacccacgtgcggctgcggatcttcgccgcccggatctacgactacgaccccctgtacaaggaggccctgcagatgctgcgggacgccggcgcccaggtgtccatcatgacctacgacgagttcaagcactgctgggacaccttcgtggaccaccagggctgccccttccagccctgggacggcctggacgagcactcccaggccctgtccggccggctgcgggccatcctgcagaaccagggcaactccggctccgagacccccggcacctccgagtccgccacccccgagtccgcagcgttcaaaccaaatcccatcaactacatcctgggcctggccatcggcatcgcctccgtgggctgggccatggtggagatcgacgaggaggagaaccccatccggctgatcgacctgggcgtgcgggtgttcgagcgggccgaggtgcccaagaccggcgactccctggccatggcccggcggctggcccggtccgtgcggcggctgacccggcggcgggcccaccggctgctgcgggcccggcggctgctgaagcgggagggcgtgctgcaggccgccgacttcgacgagaacggcctgatcaagtccctgcccaacaccccctggcagctgcgggccgccgccctggaccggaagctgacccccctggagtggtccgccgtgctgctgcacctgatcaagcaccggggctacctgtcccagcggaagaacgagggcgagaccgccgacaaggagctgggcgccctgctgaagggcgtggccaacaacgcccacgccctgcagaccggcgacttccggacccccgccgagctggccctgaacaagttcgagaaggagtccggccacatccggaaccagcggggcgactactcccacaccttctcccggaaggacctgcaggccgagctgatcctgctgttcgagaagcagaaggagttcggcaacccccacgtgtccggcggcctgaaggagggcatcgagaccctgctgatgacccagcggcccgccctgtccggcgacgccgtgcagaagatgctgggccactgcaccttcgagcccgccgagcccaaggccgccaagaacacctacaccgccgagcggttcatctggctgaccaagctgaacaacctgcggatcctggagcagggctccgagcggcccctgaccgacaccgagcgggccaccctgatggacgagccctaccggaagtccaagctgacctacgcccaggcccggaagctgctgggcctggaggacaccgccttcttcaagggcctgcggtacggcaaggacaacgccgaggcctccaccctgatggagatgaaggcctaccacgccatctcccgggccctggagaaggagggcctgaaggacaagaagtcccccctgaacctgtcctccgagctgcaggacgagatcggcaccgccttctccctgttcaagaccgacgaggacatcaccggccggctgaaggaccgggtgcagcccgagatcctggaggccctgctgaagcacatctccttcgacaagttcgtgcagatctccctgaaggccctgcggcggatcgtgcccctgatggagcagggcaagcggtacgacgaggcctgcgccgagatctacggcgaccactacggcaagaagaacaccgaggagaagatctacctgccccccatccccgccgacgagatccggaaccccgtggtgctgcgggccctgtcccaggcccggaaggtgatcaacggcgtggtgcggcggtacggctcccccgcccggatccacatcgagaccgcccgggaggtgggcaagtccttcaaggaccggaaggagatcgagaagcggcaggaggagaaccggaaggaccgggagaaggccgccgccaagttccgggagtacttccccaacttcgtgggcgagcccaagtccaaggacatcctgaagctgcggctgtacgagcagcagcacggcaagtgcctgtactccggcaaggagatcaacctggtgcggctgaacgagaagggctacgtggagatcgaccacgccctgcccttctcccggacctgggacgactccttcaacaacaaggtgctggtgctgggctccgagaaccagaacaagggcaaccagaccccctacgagtacttcaacggcaaggacaactcccgggagtggcaggagttcaaggcccgggtggagacctcccggttcccccggtccaagaagcagcggatcctgctgcagaagttcgacgaggacggcttcaaggagtgcaacctgaacgacacccggtacgtgaaccgcttcctgtgccagttcgtggccgaccacatcctgctgaccggcaagggcaagcggcgggtgttcgcctccaacggccagatcaccaacctgctgcggggcttctggggcctgcggaaggtgcgggccgagaacgaccggcaccacgccctggacgccgtggtggtggcctgctccaccgtggccatgcagcagaagatcacccggttcgtgcggtacaaggagatgaacgccttcgacggcaagaccatcgacaaggagaccggcaaggtgctgcaccagaagacccacttcccccagccctgggagttcttcgcccaggaggtgatgatccgggtgttcggcaagcccgacggcaagcccgagttcgaggaggccgacacccccgagaagctgcggaccctgctggccgagaagctgtcctcccggcccgaggccgtgcacgagtacgtgacccccctgttcgtgtcccgggcccccaaccggaagatgtccggcgcccacaaggacaccctgcggtccgccaagcggttcgtgaagcacaacgagaagatctccgtgaagcgggtgtggctgaccgagatcaagctggccgacctggagaacatggtgaactacaagaacggccgggagatcgagctgtacgaggccctgaaggcccggctggaggcctacggcggcaacgccaagcaggccttcgaccccaaggacaaccccttctacaagaagggcggccagctggtgaaggccgtgcgggtggagaagacccaggagtccggcgtgctgctgaacaagaagaacgcctacaccatcgccgacaacggcgacatggtgcgggtggacgtgttctgcaaggtggacaagaagggcaagaaccagtacttcatcgtgcccatctacgcctggcaggtggccgagaacatcctgcccgacatcgactgcaagggctaccggatcgacgactcctacaccttctgcttctccctgcacaagtacgacctgatcgccttccagaaggacgagaagtccaaggtggagttcgcctactacatcaactgcgactcctccaacggccggttctacctggcctggcacgacaagggctccaaggagcagcagttccggatctccacccagaacctggtgctgatccagaagtaccaggtgaacgagctgggcaaggagatccggccctgccggctgaagaagcggccccccgtgcggtag

SEQ ID NO: 312 - protein, 1334 aa, synthetic construct
  REGION 1..1334: note = Synthetic
MDGSGGGSPKKKRKVEDKRPAATKKAGQAKKKKGGSGGGEASPASGPRHLMDPHIFTSNFNNGIGRHKTYLCYEVERLDNGTSVKMDQHRGFLHNQAKNLLCGFYGRHAELRFLDLVPSLQLDPAQIYRVTWFISWSPCFSWGCAGEVRAFLQENTHVRLRIFAARIYDYDPLYKEALQMLRDAGAQVSIMTYDEFKHCWDTFVDHQGCPFQPWDGLDEHSQALSGRLRAILQNQGNSGSETPGTSESATPESAAFKPNPINYILGLAIGIASVGWAMVEIDEEENPIRLIDLGVRVFERAEVPKTGDSLAMARRLARSVRRLTRRRAHRLLRARRLLKREGVLQAADFDENGLIKSLPNTPWQLRAAALDRKLTPLEWSAVLLHLIKHRGYLSQRKNEGETADKELGALLKGVANNAHALQTGDFRTPAELALNKFEKESGHIRNQRGDYSHTFSRKDLQAELILLFEKQKEFGNPHVSGGLKEGIETLLMTQRPALSGDAVQKMLGHCTFEPAEPKAAKNTYTAERFIWLTKLNNLRILEQGSERPLTDTERATLMDEPYRKSKLTYAQARKLLGLEDTAFFKGLRYGKDNAEASTLMEMKAYHAISRALEKEGLKDKKSPLNLSSELQDEIGTAFSLFKTDEDITGRLKDRVQPEILEALLKHISFDKFVQISLKALRRIVPLMEQGKRYDEACAEIYGDHYGKKNTEEKIYLPPIPADEIRNPVVLRALSQARKVINGVVRRYGSPARIHIETAREVGKSFKDRKEIEKRQEENRKDREKAAAKFREYFPNFVGEPKSKDILKLRLYEQQHGKCLYSGKEINLVRLNEKGYVEIDHALPFSRTWDDSFNNKVLVLGSENQNKGNQTPYEYFNGKDNSREWQEFKARVETSRFPRSKKQRILLQKFDEDGFKECNLNDTRYVNRFLCQFVADHILLTGKGKRRVFASNGQITNLLRGFWGLRKVRAENDRHHALDAVVVACSTVAMQQKITRFVRYKEMNAFDGKTIDKETGKVLHQKTHFPQPWEFFAQEVMIRVFGKPDGKPEFEEADTPEKLRTLLAEKLSSRPEAVHEYVTPLFVSRAPNRKMSGAHKDTLRSAKRFVKHNEKISVKRVWLTEIKLADLENMVNYKNGREIELYEALKARLEAYGGNAKQAFDPKDNPFYKKGGQLVKAVRVEKTQESGVLLNKKNAYTIADNGDMVRVDVFCKVDKKGKNQYFIVPIYAWQVAENILPDIDCKGYRIDDSYTFCFSLHKYDLIAFQKDEKSKVEFAYYINCDSSNGRFYLAWHDKGSKEQQFRISTQNLVLIQKYQVNELGKEIRPCRLKKRPPVR

SEQ ID NO: 313 - protein, 1334 aa, synthetic construct
  REGION 1..1334: note = Synthetic
MDGSGGGSPKKKRKVEDKRPAATKKAGQAKKKKGGSGGGEASPASGPRHLMDPHIFTSNFNNGIGRHKTYLCYEVERLDNGTSVKMDQHRGFLHNQAKNLLCGFYGRHAELRFLDLVPSLQLDPAQIYRVTWFISWSPCFSWGCAGEVRAFLQENTHVRLRIFAARIYDYDPLYKEALQMLRDAGAQVSIMTYDEFKHCWDTFVDHQGCPFQPWDGLDEHSQALSGRLRAILQNQGNGTKDSTKDIPETPSKDAAFKPNPINYILGLAIGIASVGWAMVEIDEEENPIRLIDLGVRVFERAEVPKTGDSLAMARRLARSVRRLTRRRAHRLLRARRLLKREGVLQAADFDENGLIKSLPNTPWQLRAAALDRKLTPLEWSAVLLHLIKHRGYLSQRKNEGETADKELGALLKGVANNAHALQTGDFRTPAELALNKFEKESGHIRNQRGDYSHTFSRKDLQAELILLFEKQKEFGNPHVSGGLKEGIETLLMTQRPALSGDAVQKMLGHCTFEPAEPKAAKNTYTAERFIWLTKLNNLRILEQGSERPLTDTERATLMDEPYRKSKLTYAQARKLLGLEDTAFFKGLRYGKDNAEASTLMEMKAYHAISRALEKEGLKDKKSPLNLSSELQDEIGTAFSLFKTDEDITGRLKDRVQPEILEALLKHISFDKFVQISLKALRRIVPLMEQGKRYDEACAEIYGDHYGKKNTEEKIYLPPIPADEIRNPVVLRALSQARKVINGVVRRYGSPARIHIETAREVGKSFKDRKEIEKRQEENRKDREKAAAKFREYFPNFVGEPKSKDILKLRLYEQQHGKCLYSGKEINLVRLNEKGYVEIDHALPFSRTWDDSFNNKVLVLGSENQNKGNQTPYEYFNGKDNSREWQEFKARVETSRFPRSKKQRILLQKFDEDGFKECNLNDTRYVNRFLCQFVADHILLTGKGKRRVFASNGQITNLLRGFWGLRKVRAENDRHHALDAVVVACSTVAMQQKITRFVRYKEMNAFDGKTIDKETGKVLHQKTHFPQPWEFFAQEVMIRVFGKPDGKPEFEEADTPEKLRTLLAEKLSSRPEAVHEYVTPLFVSRAPNRKMSGAHKDTLRSAKRFVKHNEKISVKRVWLTEIKLADLENMVNYKNGREIELYEALKARLEAYGGNAKQAFDPKDNPFYKKGGQLVKAVRVEKTQESGVLLNKKNAYTIADNGDMVRVDVFCKVDKKGKNQYFIVPIYAWQVAENILPDIDCKGYRIDDSYTFCFSLHKYDLIAFQKDEKSKVEFAYYINCDSSNGRFYLAWHDKGSKEQQFRISTQNLVLIQKYQVNELGKEIRPCRLKKRPPVR

SEQ ID NO: 314 - RNA, 5990 nt, synthetic construct
  misc_feature 1..5990: note = Synthetic
  source 1..5990: mol_type = other RNA
gggaagctcagaataaacgctcaactttggccggatctgccaccatggaggcctcccccgcctccggcccccggcacctgatggacccccacatcttcacctccaacttcaacaacggcatcggccggcacaagacctacctgtgctacgaggtggagcggctggacaacggcacctccgtgaagatggaccagcaccggggcttcctgcacaaccaggccaagaacctgctgtgcggcttctacggccggcacgccgagctgcggttcctggacctggtgccctccctgcagctggaccccgcccagatctaccgggtgacctggttcatctcctggtccccctgcttctcctggggctgcgccggcgaggtgcgggccttcctgcaggagaacacccacgtgcggctgcggatcttcgccgcccggatctacgactacgaccccctgtacaaggaggccctgcagatgctgcgggacgccggcgcccaggtgtccatcatgacctacgacgagttcaagcactgctgggacaccttcgtggaccaccagggctgccccttccagccctgggacggcctggacgagcactcccaggccctgtccggccggctgcgggccatcctgcagaaccagggcaactccggctccgagacccccggcacctccgagtccgccacccccgagtccgacaagaagtactccatcggcctggccatcggcaccaactccgtgggctgggccgtgatcaccgacgagtacaaggtgccctccaagaagttcaaggtgctgggcaacaccgaccggcactccatcaagaagaacctgatcggcgccctgctgttcgactccggcgagaccgccgaggccacccggctgaagcggaccgcccggcggcggtacacccggcggaagaaccggatctgctacctgcaggagatcttctccaacgagatggccaaggtggacgactccttcttccaccggctggaggagtccttcctggtggaggaggacaagaagcacgagcggcaccccatcttcggcaacatcgtggacgaggtggcctaccacgagaagtaccccaccatctaccacctgcggaagaagctggtggactccaccgacaaggccgacctgcggctgatctacctggccctggcccacatgatcaagttccggggccacttcctgatcgagggcgacctgaaccccgacaactccgacgtggacaagctgttcatccagctggtgcagacctacaaccagctgttcgaggagaaccccatcaacgcctccggcgtggacgccaaggccatcctgtccgcccggctgtccaagtcccggcggctggagaacctgatcgcccagctgcccggcgagaagaagaacggcctgttcggcaacctgatcgccctgtccctgggcctgacccccaacttcaagtccaacttcgacctggccgaggacgccaagctgcagctgtccaaggacacctacgacgacgacctggacaacctgctggcccagatcggcgaccagtacgccgacctgttcctggccgccaagaacctgtccgacgccatcctgctgtccgacatcctgcgggtgaacaccgagatcaccaaggcccccctgtccgcctccatgatcaagcggtacgacgagcaccaccaggacctgaccctgctgaaggccctggtgcggcagcagctgcccgagaagtacaaggagatcttcttcgaccagtccaagaacggctacgccggctacatcgacggcggcgcctcccaggaggagttctacaagttcatcaagcccatcctggagaagatggacggcaccgaggagctgctggtgaagctgaaccgggaggacctgctgcggaagcagcggaccttcgacaacggctccatcccccaccagatccacctgggcgagctgcacgccatcctgcggcggcaggaggacttctaccccttcctgaaggacaaccgggagaagatcgagaagatcctgaccttccggatcccctactacgtgggccccctggcccggggcaactcccggttcgcctggatgacccggaagtccgaggagaccatcaccccctggaacttcgaggaggtggtggacaagggcgcctccgcccagtccttcatcgagcggatgaccaacttcgacaagaacctgcccaacgagaaggtgctgcccaagcactccctgctgtacgagtacttcaccgtgtacaacgagctgaccaaggtgaagtacgtgaccgagggcatgcggaagcccgccttcctgtccggcgagcagaagaaggccatcgtggacctgctgttcaagaccaaccggaaggtgaccgtgaagcagctgaaggaggactacttcaagaagatcgagtgcttcgactccgtggagatctccggcgtggaggaccggttcaacgcctccctgggcacctaccacgacctgctgaagatcatcaaggacaaggacttcctggacaacgaggagaacgaggacatcctggaggacatcgtgctgaccctgaccctgttcgaggaccgggagatgatcgaggagcggctgaagacctacgcccacctgttcgacgacaaggtgatgaagcagctgaagcggcggcggtacaccggctggggccggctgtcccggaagctgatcaacggcatccgggacaagcagtccggcaagaccatcctggacttcctgaagtccgacggcttcgccaaccggaacttcatgcagctgatccacgacgactccctgaccttcaaggaggacatccagaaggcccaggtgtccggccagggcgactccctgcacgagcacatcgccaacctggccggctcccccgccatcaagaagggcatcctgcagaccgtgaaggtggtggacgagctggtgaaggtgatgggccggcacaagcccgagaacatcgtgatcgagatggcccgggagaaccagaccacccagaagggccagaagaactcccgggagcggatgaagcggatcgaggagggcatcaaggagctgggctcccagatcctgaaggagcaccccgtggagaacacccagctgcagaacgagaagctgtacctgtactacctgcagaacggccgggacatgtacgtggaccaggagctggacatcaaccggctgtccgactacgacgtggaccacatcgtgccccagtccttcctgaaggacgactccatcgacaacaaggtgctgacccggtccgacaagaaccggggcaagtccgacaacgtgccctccgaggaggtggtgaagaagatgaagaactactggcggcagctgctgaacgccaagctgatcacccagcggaagttcgacaacctgaccaaggccgagcggggcggcctgtccgagctggacaaggccggcttcatcaagcggcagctggtggagacccggcagatcaccaagcacgtggcccagatcctggactcccggatgaacaccaagtacgacgagaacgacaagctgatccgggaggtgaaggtgatcaccctgaagtccaagctggtgtccgacttccggaaggacttccagttctacaaggtgcgggagatcaacaactaccaccacgcccacgacgcctacctgaacgccgtggtgggcaccgccctgatcaagaagtaccccaagctggagtccgagttcgtgtacggcgactacaaggtgtacgacgtgcggaagatgatcgccaagtccgagcaggagatcggcaaggccaccgccaagtacttcttctactccaacatcatgaacttcttcaagaccgagatcaccctggccaacggcgagatccggaagcggcccctgatcgagaccaacggcgagaccggcgagatcgtgtgggacaagggccgggacttcgccaccgtgcggaaggtgctgtccatgccccaggtgaacatcgtgaagaagaccgaggtgcagaccggcggcttctccaaggagtccatcctgcccaagcggaactccgacaagctgatcgcccggaagaaggactgggaccccaagaagtacggcggcttcgactcccccaccgtggcctactccgtgctggtggtggccaaggtggagaagggcaagtccaagaagctgaagtccgtgaaggagctgctgggcatcaccatcatggagcggtcctccttcgagaagaaccccatcgacttcctggaggccaagggctacaaggaggtgaagaaggacctgatcatcaagctgcccaagtactccctgttcgagctggagaacggccggaagcggatgctggcctccgccggcgagctgcagaagggcaacgagctggccctgccctccaagtacgtgaacttcctgtacctggcctcccactacgagaagctgaagggctcccccgaggacaacgagcagaagcagctgttcgtggagcagcacaagcactacctggacgagatcatcgagcagatctccgagttctccaagcgggtgatcctggccgacgccaacctggacaaggtgctgtccgcctacaacaagcaccgggacaagcccatccgggagcaggccgagaacatcatccacctgttcaccctgaccaacctgggcgcccccgccgccttcaagtacttcgacaccaccatcgaccggaagcggtacacctccaccaaggaggtgctggacgccaccctgatccaccagtccatcaccggcctgtacgagacccggatcgacctgtcccagctgggcggcgactccggcggctccggcggctccggcggctccaccaacctgtccgacatcatcgagaaggagaccggcaagcagctggtgatccaggagtccatcctgatgctgcccgaggaggtggaggaggtgatcggcaacaagcccgagtccgacatcctggtgcacaccgcctacgacgagtccaccgacgagaacgtgatgctgctgacctccgacgcccccgagtacaagccctgggccctggtgatccaggactccaacggcgagaacaagatcaagatgctgtccggcggctccggcggctccggcggctccaccaacctgtccgacatcatcgagaaggagaccggcaagcagctggtgatccaggagtccatcctgatgctgcccgaggaggtggaggaggtgatcggcaacaagcccgagtccgacatcctggtgcacaccgcctacgacgagtccaccgacgagaacgtgatgctgctgacctccgacgcccccgagtacaagccctgggccctggtgatccaggactccaacggcgagaacaagatcaagatgctgtccggcggctccaagcggaccgccgacggctccgagttcgagcccaagaagaagcggaaggtgtccgagtccgccacccccgagtccgtgtccggctggcggctgttcaagaagatctcctgatagctagcaccagcctcaagaacacccgaatggagtctctaagctacataataccaacttacactttacaaaatgttgtcccccaaaatgtagccattcgtatctgctcctaataaaaagaaagtttcttcacattctctcgagaaaaaaaaaaaatggaaaaaaaaaaaacggaaaaaaaaaaaaggtaaaaaaaaaaaatataaaaaaaaaaaacataaaaaaaaaaaacgaaaaaaaaaaaacgtaaaaaaaaaaaactcaaaaaaaaaaaagataaaaaaaaaaaacctaaaaaaaaaaaatgtaaaaaaaaaaaagggaaaaaaaaaaaacgcaaaaaaaaaaaacacaaaaaaaaaaaatgcaaaaaaaaaaaatcgaaaaaaaaaaaatctaaaaaaaaaaaacgaaaaaaaaaaaacccaaaaaaaaaaaagacaaaaaaaaaaaatagaaaaaaaaaaaagttaaaaaaaaaaaactgaaaaaaaaaaaatttaaaaaaaaaaaatctag

SEQ ID NO: 315 - RNA, 4563 nt, synthetic construct
  misc_feature 1..4563: note = Synthetic
  source 1..4563: mol_type = other RNA
gggaagctcagaataaacgctcaactttggccggatctgccaccatggacggctccggcggcggctcccccaagaagaagcggaaggtggaggacaagcggcccgccgccaccaagaaggccggccaggccaagaagaagaagggcggctccggcggcggcgaggcctcccccgcctccggcccccggcacctgatggacccccacatcttcacctccaacttcaacaacggcatcggccggcacaagacctacctgtgctacgaggtggagcggctggacaacggcacctccgtgaagatggaccagcaccggggcttcctgcacaaccaggccaagaacctgctgtgcggcttctacggccggcacgccgagctgcggttcctggacctggtgccctccctgcagctggaccccgcccagatctaccgggtgacctggttcatctcctggtccccctgcttctcctggggctgcgccggcgaggtgcgggccttcctgcaggagaacacccacgtgcggctgcggatcttcgccgcccggatctacgactacgaccccctgtacaaggaggccctgcagatgctgcgggacgccggcgcccaggtgtccatcatgacctacgacgagttcaagcactgctgggacaccttcgtggaccaccagggctgccccttccagccctgggacggcctggacgagcactcccaggccctgtccggccggctgcgggccatcctgcagaaccagggcaactccggctccgagacccccggcacctccgagtccgccacccccgagtccgcagcgttcaaaccaaatcccatcaactacatcctgggcctggccatcggcatcgcctccgtgggctgggccatggtggagatcgacgaggaggagaaccccatccggctgatcgacctgggcgtgcgggtgttcgagcgggccgaggtgcccaagaccggcgactccctggccatggcccggcggctggcccggtccgtgcggcggctgacccggcggcgggcccaccggctgctgcgggcccggcggctgctgaagcgggagggcgtgctgcaggccgccgacttcgacgagaacggcctgatcaagtccctgcccaacaccccctggcagctgcgggccgccgccctggaccggaagctgacccccctggagtggtccgccgtgctgctgcacctgatcaagcaccggggctacctgtcccagcggaagaacgagggcgagaccgccgacaaggagctgggcgccctgctgaagggcgtggccaacaacgcccacgccctgcagaccggcgacttccggacccccgccgagctggccctgaacaagttcgagaaggagtccggccacatccggaaccagcggggcgactactcccacaccttctcccggaaggacctgcaggccgagctgatcctgctgttcgagaagcagaaggagttcggcaacccccacgtgtccggcggcctgaaggagggcatcgagaccctgctgatgacccagcggcccgccctgtccggcgacgccgtgcagaagatgctgggccactgcaccttcgagcccgccgagcccaaggccgccaagaacacctacaccgccgagcggttcatctggctgaccaagctgaacaacctgcggatcctggagcagggctccgagcggcccctgaccgacaccgagcgggccaccctgatggacgagccctaccggaagtccaagctgacctacgcccaggcccggaagctgctgggcctggaggacaccgccttcttcaagggcctgcggtacggcaaggacaacgccgaggcctccaccctgatggagatgaaggcctaccacgccatctcccgggccctggagaaggagggcctgaaggacaagaagtcccccctgaacctgtcctccgagctgcaggacgagatcggcaccgccttctccctgttcaagaccgacgaggacatcaccggccggctgaaggaccgggtgcagcccgagatcctggaggccctgctgaagcacatctccttcgacaagttcgtgcagatctccctgaaggccctgcggcggatcgtgcccctgatggagcagggcaagcggtacgacgaggcctgcgccgagatctacggcgaccactacggcaagaagaacaccgaggagaagatctacctgccccccatccccgccgacgagatccggaaccccgtggtgctgcgggccctgtcccaggcccggaaggtgatcaacggcgtggtgcggcggtacggctcccccgcccggatccacatcgagaccgcccgggaggtgggcaagtccttcaaggaccggaaggagatcgagaagcggcaggaggagaaccggaaggaccgggagaaggccgccgccaagttccgggagtacttccccaacttcgtgggcgagcccaagtccaaggacatcctgaagctgcggctgtacgagcagcagcacggcaagtgcctgtactccggcaaggagatcaacctggtgcggctgaacgagaagggctacgtggagatcgaccacgccctgcccttctcccggacctgggacgactccttcaacaacaaggtgctggtgctgggctccgagaaccagaacaagggcaaccagaccccctacgagtacttcaacggcaaggacaactcccgggagtggcaggagttcaaggcccgggtggagacctcccggttcccccggtccaagaagcagcggatcctgctgcagaagttcgacgaggacggcttcaaggagtgcaacctgaacgacacccggtacgtgaaccgcttcctgtgccagttcgtggccgaccacatcctgctgaccggcaagggcaagcggcgggtgttcgcctccaacggccagatcaccaacctgctgcggggcttctggggcctgcggaaggtgcgggccgagaacgaccggcaccacgccctggacgccgtggtggtggcctgctccaccgtggccatgcagcagaagatcacccggttcgtgcggtacaaggagatgaacgccttcgacggcaagaccatcgacaaggagaccggcaaggtgctgcaccagaagacccacttcccccagccctgggagttcttcgcccaggaggtgatgatccgggtgttcggcaagcccgacggcaagcccgagttcgaggaggccgacacccccgagaagctgcggaccctgctggccgagaagctgtcctcccggcccgaggccgtgcacgagtacgtgacccccctgttcgtgtcccgggcccccaaccggaagatgtccggcgcccacaaggacaccctgcggtccgccaagcggttcgtgaagcacaacgagaagatctccgtgaagcgggtgtggctgaccgagatcaagctggccgacctggagaacatggtgaactacaagaacggccgggagatcgagctgtacgaggccctgaaggcccggctggaggcctacggcggcaacgccaagcaggccttcgaccccaaggacaaccccttctacaagaagggcggccagctggtgaaggccgtgcgggtggagaagacccaggagtccggcgtgctgctgaacaagaagaacgcctacaccatcgccgacaacggcgacatggtgcgggtggacgtgttctgcaaggtggacaagaagggcaagaaccagtacttcatcgtgcccatctacgcctggcaggtggccgagaacatcctgcccgacatcgactgcaagggctaccggatcgacgactcctacaccttctgcttctccctgcacaagtacgacctgatcgccttccagaaggacgagaagtccaaggtggagttcgcctactacatcaactgcgactcctccaacggccggttctacctggcctggcacgacaagggctccaaggagcagcagttccggatctccacccagaacctggtgctgatccagaagtaccaggtgaacgagctgggcaaggagatccggccctgccggctgaagaagcggccccccgtgcggtagtgactagcaccagcctcaagaacacccgaatggagtctctaagctacataataccaacttacactttacaaaatgttgtcccccaaaatgtagccattcgtatctgctcctaataaaaagaaagtttcttcacattctctcgagaaaaaaaaaaaatggaaaaaaaaaaaacggaaaaaaaaaaaggtaaaaaaaaaaaatataaaaaaaaaaacataaaaaaaaaaaacgaaaaaaaaaaaacgtaaaaaaaaaaaactcaaaaaaaaaaagataaaaaaaaaaaacctaaaaaaaaaaaatgtaaaaaaaaaaaagggaaaaaaaaaaacgcaaaaaaaaaaaacacaaaaaaaaaaaatgcaaaaaaaaaaaatcgaaaaaaaaaaaatctaaaaaaaaaaaacgaaaaaaaaaaaacccaaaaaaaaaaaagacaaaaaaaaaaaatagaaaaaaaaaaagttaaaaaaaaaaaactgaaaaaaaaaaaatttaaaaaaaaaaaatctag

SEQ ID NO: 316 - RNA, 944 nt, synthetic construct
  misc_feature 1..944: note = Synthetic
  source 1..944: mol_type = other RNA
gggaagctcagaataaacgctcaactttggccggatctgccaccatgaccaacctgtccgacatcatcgagaaggagaccggcaagcagctggtgatccaggagtccatcctgatgctgcccgaggaggtggaggaggtgatcggcaacaagcccgagtccgacatcctggtgcacaccgcctacgacgagtccaccgacgagaacgtgatgctgctgacctccgacgcccccgagtacaagccctgggccctggtgatccaggactccaacggcgagaacaagatcaagatgctgtccggcggctccaagcggaccgccgacggctccgagttcgagtcccccaagaagaagcggaaggtggagtccgagtccgccacccccgagtccgtgtccggctggcggctgttcaagaagatctcctgatagctagcaccagcctcaagaacacccgaatggagtctctaagctacataataccaacttacactttacaaaatgttgtcccccaaaatgtagccattcgtatctgctcctaataaaaagaaagtttcttcacattctctcgagaaaaaaaaaaaatggaaaaaaaaaaaacggaaaaaaaaaaaaggtaaaaaaaaaaaatataaaaaaaaaaaacataaaaaaaaaaaacgaaaaaaaaaaaacgtaaaaaaaaaaaactcaaaaaaaaaaaagataaaaaaaaaaaacctaaaaaaaaaaaatgtaaaaaaaaaaaagggaaaaaaaaaaaacgcaaaaaaaaaaaacacaaaaaaaaaaaatgcaaaaaaaaaaaatcgaaaaaaaaaaaatctaaaaaaaaaaaacgaaaaaaaaaaaacccaaaaaaaaaaaagacaaaaaaaaaaaatagaaaaaaaaaaaagttaaaaaaaaaaaactgaaaaaaaaaaaatttaaaaaaaaaaaatctag

SEQ ID NO: 317-319 - skipped (3 entries)

SEQ ID NO: 320 - protein, 1120 aa, synthetic construct
  REGION 1..1120: note = Synthetic
MDGSGGGSPKKKRKVEDKRPAATKKAGQAKKKKGGSGGGAAFKPNPINYILGLDIGIASVGWAMVEIDEEENPIRLIDLGVRVFERAEVPKTGDSLAMARRLARSVRRLTRRRAHRLLRARRLLKREGVLQAADFDENGLIKSLPNTPWQLRAAALDRKLTPLEWSAVLLHLIKHRGYLSQRKNEGETADKELGALLKGVANNAHALQTGDFRTPAELALNKFEKESGHIRNQRGDYSHTFSRKDLQAELILLFEKQKEFGNPHVSGGLKEGIETLLMTQRPALSGDAVQKMLGHCTFEPAEPKAAKNTYTAERFIWLTKLNNLRILEQGSERPLTDTERATLMDEPYRKSKLTYAQARKLLGLEDTAFFKGLRYGKDNAEASTLMEMKAYHAISRALEKEGLKDKKSPLNLSSELQDEIGTAFSLFKTDEDITGRLKDRVQPEILEALLKHISFDKFVQISLKALRRIVPLMEQGKRYDEACAEIYGDHYGKKNTEEKIYLPPIPADEIRNPVVLRALSQARKVINGVVRRYGSPARIHIETAREVGKSFKDRKEIEKRQEENRKDREKAAAKFREYFPNFVGEPKSKDILKLRLYEQQHGKCLYSGKEINLVRLNEKGYVEIDHALPFSRTWDDSFNNKVLVLGSENQNKGNQTPYEYFNGKDNSREWQEFKARVETSRFPRSKKQRILLQKFDEDGFKECNLNDTRYVNRFLCQFVADHILLTGKGKRRVFASNGQITNLLRGFWGLRKVRAENDRHHALDAVVVACSTVAMQQKITRFVRYKEMNAFDGKTIDKETGKVLHQKTHFPQPWEFFAQEVMIRVFGKPDGKPEFEEADTPEKLRTLLAEKLSSRPEAVHEYVTPLFVSRAPNRKMSGAHKDTLRSAKRFVKHNEKISVKRVWLTEIKLADLENMVNYKNGREIELYEALKARLEAYGGNAKQAFDPKDNPFYKKGGQLVKAVRVEKTQESGVLLNKKNAYTIADNGDMVRVDVFCKVDKKGKNQYFIVPIYAWQVAENILPDIDCKGYRIDDSYTFCFSLHKYDLIAFQKDEKSKVEFAYYINCDSSNGRFYLAWHDKGSKEQQFRISTQNLVLIQKYQVNELGKEIRPCRLKKRPPVR

SEQ ID NO: 321 - protein, 1593 aa, synthetic construct
  REGION 1..1593: note = Synthetic
MEASPASGPRHLMDPHIFTSNFNNGIGRHKTYLCYEVERLDNGTSVKMDQHRGFLHNQAKNLLCGFYGRHAELRFLDLVPSLQLDPAQIYRVTWFISWSPCFSWGCAGEVRAFLQENTHVRLRIFAARIYDYDPLYKEALQMLRDAGAQVSIMTYDEFKHCWDTFVDHQGCPFQPWDGLDEHSQALSGRLRAILQNQGNGTKDSTKDIPETPSKDDKKYSIGLAIGTNSVGWAVITDEYKVPSKKFKVLGNTDRHSIKKNLIGALLFDSGETAEATRLKRTARRRYTRRKNRICYLQEIFSNEMAKVDDSFFHRLEESFLVEEDKKHERHPIFGNIVDEVAYHEKYPTIYHLRKKLVDSTDKADLRLIYLALAHMIKFRGHFLIEGDLNPDNSDVDKLFIQLVQTYNQLFEENPINASGVDAKAILSARLSKSRRLENLIAQLPGEKKNGLFGNLIALSLGLTPNFKSNFDLAEDAKLQLSKDTYDDDLDNLLAQIGDQYADLFLAAKNLSDAILLSDILRVNTEITKAPLSASMIKRYDEHHQDLTLLKALVRQQLPEKYKEIFFDQSKNGYAGYIDGGASQEEFYKFIKPILEKMDGTEELLVKLNREDLLRKQRTFDNGSIPHQIHLGELHAILRRQEDFYPFLKDNREKIEKILTFRIPYYVGPLARGNSRFAWMTRKSEETITPWNFEEVVDKGASAQSFIERMTNFDKNLPNEKVLPKHSLLYEYFTVYNELTKVKYVTEGMRKPAFLSGEQKKAIVDLLFKTNRKVTVKQLKEDYFKKIECFDSVEISGVEDRFNASLGTYHDLLKIIKDKDFLDNEENEDILEDIVLTLTLFEDREMIEERLKTYAHLFDDKVMKQLKRRRYTGWGRLSRKLINGIRDKQSGKTILDFLKSDGFANRNFMQLIHDDSLTFKEDIQKAQVSGQGDSLHEHIANLAGSPAIKKGILQTVKVVDELVKVMGRHKPENIVIEMARENQTTQKGQKNSRERMKRIEEGIKELGSQILKEHPVENTQLQNEKLYLYYLQNGRDMYVDQELDINRLSDYDVDHIVPQSFLKDDSIDNKVLTRSDKNRGKSDNVPSEEVVKKMKNYWRQLLNAKLITQRKFDNLTKAERGGLSELDKAGFIKRQLVETRQITKHVAQILDSRMNTKYDENDKLIREVKVITLKSKLVSDFRKDFQFYKVREINNYHHAHDAYLNAVVGTALIKKYPKLESEFVYGDYKVYDVRKMIAKSEQEIGKATAKYFFYSNIMNFFKTEITLANGEIRKRPLIETNGETGEIVWDKGRDFATVRKVLSMPQVNIVKKTEVQTGGFSKESILPKRNSDKLIARKKDWDPKKYGGFDSPTVAYSVLVVAKVEKGKSKKLKSVKELLGITIMERSSFEKNPIDFLEAKGYKEVKKDLIIKLPKYSLFELENGRKRMLASAGELQKGNELALPSKYVNFLYLASHYEKLKGSPEDNEQKQLFVEQHKHYLDEIIEQISEFSKRVILADANLDKVLSAYNKHRDKPIREQAENIIHLFTLTNLGAPAAFKYFDTTIDRKRYTSTKEVLDATLIHQSITGLYETRIDLSQLGGDGGGSPKKKRKV

SEQ ID NO: 322 - protein, 1593 aa, synthetic construct
  REGION 1..1593: note = Synthetic
MEASPASGPRHLMDPHIFTSNFNNGIGRHKTYLCYEVERLDNGTSVKMDQHRGFLHNQAKNLLCGFYGRHAELRFLDLVPSLQLDPAQIYRVTWFISWSPCFSWGCAGEVRAFLQENTHVRLRIFAARIYDYDPLYKEALQMLRDAGAQVSIMTYDEFKHCWDTFVDHQGCPFQPWDGLDEHSQALSGRLRAILQNQGNGRDVRQPEVKEEKPESDKKYSIGLAIGTNSVGWAVITDEYKVPSKKFKVLGNTDRHSIKKNLIGALLFDSGETAEATRLKRTARRRYTRRKNRICYLQEIFSNEMAKVDDSFFHRLEESFLVEEDKKHERHPIFGNIVDEVAYHEKYPTIYHLRKKLVDSTDKADLRLIYLALAHMIKFRGHFLIEGDLNPDNSDVDKLFIQLVQTYNQLFEENPINASGVDAKAILSARLSKSRRLENLIAQLPGEKKNGLFGNLIALSLGLTPNFKSNFDLAEDAKLQLSKDTYDDDLDNLLAQIGDQYADLFLAAKNLSDAILLSDILRVNTEITKAPLSASMIKRYDEHHQDLTLLKALVRQQLPEKYKEIFFDQSKNGYAGYIDGGASQEEFYKFIKPILEKMDGTEELLVKLNREDLLRKQRTFDNGSIPHQIHLGELHAILRRQEDFYPFLKDNREKIEKILTFRIPYYVGPLARGNSRFAWMTRKSEETITPWNFEEVVDKGASAQSFIERMTNFDKNLPNEKVLPKHSLLYEYFTVYNELTKVKYVTEGMRKPAFLSGEQKKAIVDLLFKTNRKVTVKQLKEDYFKKIECFDSVEISGVEDRFNASLGTYHDLLKIIKDKDFLDNEENEDILEDIVLTLTLFEDREMIEERLKTYAHLFDDKVMKQLKRRRYTGWGRLSRKLINGIRDKQSGKTILDFLKSDGFANRNFMQLIHDDSLTFKEDIQKAQVSGQGDSLHEHIANLAGSPAIKKGILQTVKVVDELVKVMGRHKPENIVIEMARENQTTQKGQKNSRERMKRIEEGIKELGSQILKEHPVENTQLQNEKLYLYYLQNGRDMYVDQELDINRLSDYDVDHIVPQSFLKDDSIDNKVLTRSDKNRGKSDNVPSEEVVKKMKNYWRQLLNAKLITQRKFDNLTKAERGGLSELDKAGFIKRQLVETRQITKHVAQILDSRMNTKYDENDKLIREVKVITLKSKLVSDFRKDFQFYKVREINNYHHAHDAYLNAVVGTALIKKYPKLESEFVYGDYKVYDVRKMIAKSEQEIGKATAKYFFYSNIMNFFKTEITLANGEIRKRPLIETNGETGEIVWDKGRDFATVRKVLSMPQVNIVKKTEVQTGGFSKESILPKRNSDKLIARKKDWDPKKYGGFDSPTVAYSVLVVAKVEKGKSKKLKSVKELLGITIMERSSFEKNPIDFLEAKGYKEVKKDLIIKLPKYSLFELENGRKRMLASAGELQKGNELALPSKYVNFLYLASHYEKLKGSPEDNEQKQLFVEQHKHYLDEIIEQISEFSKRVILADANLDKVLSAYNKHRDKPIREQAENIIHLFTLTNLGAPAAFKYFDTTIDRKRYTSTKEVLDATLIHQSITGLYETRIDLSQLGGDGGGSPKKKRKV

SEQ ID NO: 323 - protein, 1593 aa, synthetic construct
  REGION 1..1593: note = Synthetic
MEASPASGPRHLMDPHIFTSNFNNGIGRHKTYLCYEVERLDNGTSVKMDQHRGFLHNQAKNLLCGFYGRHAELRFLDLVPSLQLDPAQIYRVTWFISWSPCFSWGCAGEVRAFLQENTHVRLRIFAARIYDYDPLYKEALQMLRDAGAQVSIMTYDEFKHCWDTFVDHQGCPFQPWDGLDEHSQALSGRLRAILQNQGNEGKSSGSGSESKSTAGDKKYSIGLAIGTNSVGWAVITDEYKVPSKKFKVLGNTDRHSIKKNLIGALLFDSGETAEATRLKRTARRRYTRRKNRICYLQEIFSNEMAKVDDSFFHRLEESFLVEEDKKHERHPIFGNIVDEVAYHEKYPTIYHLRKKLVDSTDKADLRLIYLALAHMIKFRGHFLIEGDLNPDNSDVDKLFIQLVQTYNQLFEENPINASGVDAKAILSARLSKSRRLENLIAQLPGEKKNGLFGNLIALSLGLTPNFKSNFDLAEDAKLQLSKDTYDDDLDNLLAQIGDQYADLFLAAKNLSDAILLSDILRVNTEITKAPLSASMIKRYDEHHQDLTLLKALVRQQLPEKYKEIFFDQSKNGYAGYIDGGASQEEFYKFIKPILEKMDGTEELLVKLNREDLLRKQRTFDNGSIPHQIHLGELHAILRRQEDFYPFLKDNREKIEKILTFRIPYYVGPLARGNSRFAWMTRKSEETITPWNFEEVVDKGASAQSFIERMTNFDKNLPNEKVLPKHSLLYEYFTVYNELTKVKYVTEGMRKPAFLSGEQKKAIVDLLFKTNRKVTVKQLKEDYFKKIECFDSVEISGVEDRFNASLGTYHDLLKIIKDKDFLDNEENEDILEDIVLTLTLFEDREMIEERLKTYAHLFDDKVMKQLKRRRYTGWGRLSRKLINGIRDKQSGKTILDFLKSDGFANRNFMQLIHDDSLTFKEDIQKAQVSGQGDSLHEHIANLAGSPAIKKGILQTVKVVDELVKVMGRHKPENIVIEMARENQTTQKGQKNSRERMKRIEEGIKELGSQILKEHPVENTQLQNEKLYLYYLQNGRDMYVDQELDINRLSDYDVDHIVPQSFLKDDSIDNKVLTRSDKNRGKSDNVPSEEVVKKMKNYWRQLLNAKLITQRKFDNLTKAERGGLSELDKAGFIKRQLVETRQITKHVAQILDSRMNTKYDENDKLIREVKVITLKSKLVSDFRKDFQFYKVREINNYHHAHDAYLNAVVGTALIKKYPKLESEFVYGDYKVYDVRKMIAKSEQEIGKATAKYFFYSNIMNFFKTEITLANGEIRKRPLIETNGETGEIVWDKGRDFATVRKVLSMPQVNIVKKTEVQTGGFSKESILPKRNSDKLIARKKDWDPKKYGGFDSPTVAYSVLVVAKVEKGKSKKLKSVKELLGITIMERSSFEKNPIDFLEAKGYKEVKKDLIIKLPKYSLFELENGRKRMLASAGELQKGNELALPSKYVNFLYLASHYEKLKGSPEDNEQKQLFVEQHKHYLDEIIEQISEFSKRVILADANLDKVLSAYNKHRDKPIREQAENIIHLFTLTNLGAPAAFKYFDTTIDRKRYTSTKEVLDATLIHQSITGLYETRIDLSQLGGDGGGSPKKKRKV

SEQ ID NO: 324 - protein, 1593 aa, synthetic construct
  REGION 1..1593: note = Synthetic
MEASPASGPRHLMDPHIFTSNFNNGIGRHKTYLCYEVERLDNGTSVKMDQHRGFLHNQAKNLLCGFYGRHAELRFLDLVPSLQLDPAQIYRVTWFISWSPCFSWGCAGEVRAFLQENTHVRLRIFAARIYDYDPLYKEALQMLRDAGAQVSIMTYDEFKHCWDTFVDHQGCPFQPWDGLDEHSQALSGRLRAILQNQGNTPGSPAGSPTSTEEGTDKKYSIGLAIGTNSVGWAVITDEYKVPSKKFKVLGNTDRHSIKKNLIGALLFDSGETAEATRLKRTARRRYTRRKNRICYLQEIFSNEMAKVDDSFFHRLEESFLVEEDKKHERHPIFGNIVDEVAYHEKYPTIYHLRKKLVDSTDKADLRLIYLALAHMIKFRGHFLIEGDLNPDNSDVDKLFIQLVQTYNQLFEENPINASGVDAKAILSARLSKSRRLENLIAQLPGEKKNGLFGNLIALSLGLTPNFKSNFDLAEDAKLQLSKDTYDDDLDNLLAQIGDQYADLFLAAKNLSDAILLSDILRVNTEITKAPLSASMIKRYDEHHQDLTLLKALVRQQLPEKYKEIFFDQSKNGYAGYIDGGASQEEFYKFIKPILEKMDGTEELLVKLNREDLLRKQRTFDNGSIPHQIHLGELHAILRRQEDFYPFLKDNREKIEKILTFRIPYYVGPLARGNSRFAWMTRKSEETITPWNFEEVVDKGASAQSFIERMTNFDKNLPNEKVLPKHSLLYEYFTVYNELTKVKYVTEGMRKPAFLSGEQKKAIVDLLFKTNRKVTVKQLKEDYFKKIECFDSVEISGVEDRFNASLGTYHDLLKIIKDKDFLDNEENEDILEDIVLTLTLFEDREMIEERLKTYAHLFDDKVMKQLKRRRYTGWGRLSRKLINGIRDKQSGKTILDFLKSDGFANRNFMQLIHDDSLTFKEDIQKAQVSGQGDSLHEHIANLAGSPAIKKGILQTVKVVDELVKVMGRHKPENIVIEMARENQTTQKGQKNSRERMKRIEEGIKELGSQILKEHPVENTQLQNEKLYLYYLQNGRDMYVDQELDINRLSDYDVDHIVPQSFLKDDSIDNKVLTRSDKNRGKSDNVPSEEVVKKMKNYWRQLLNAKLITQRKFDNLTKAERGGLSELDKAGFIKRQLVETRQITKHVAQILDSRMNTKYDENDKLIREVKVITLKSKLVSDFRKDFQFYKVREINNYHHAHDAYLNAVVGTALIKKYPKLESEFVYGDYKVYDVRKMIAKSEQEIGKATAKYFFYSNIMNFFKTEITLANGEIRKRPLIETNGETGEIVWDKGRDFATVRKVLSMPQVNIVKKTEVQTGGFSKESILPKRNSDKLIARKKDWDPKKYGGFDSPTVAYSVLVVAKVEKGKSKKLKSVKELLGITIMERSSFEKNPIDFLEAKGYKEVKKDLIIKLPKYSLFELENGRKRMLASAGELQKGNELALPSKYVNFLYLASHYEKLKGSPEDNEQKQLFVEQHKHYLDEIIEQISEFSKRVILADANLDKVLSAYNKHRDKPIREQAENIIHLFTLTNLGAPAAFKYFDTTIDRKRYTSTKEVLDATLIHQSITGLYETRIDLSQLGGDGGGSPKKKRKV

SEQ ID NO: 325 - protein, 1593 aa, synthetic construct
  REGION 1..1593: note = Synthetic
MEASPASGPRHLMDPHIFTSNFNNGIGRHKTYLCYEVERLDNGTSVKMDQHRGFLHNQAKNLLCGFYGRHAELRFLDLVPSLQLDPAQIYRVTWFISWSPCFSWGCAGEVRAFLQENTHVRLRIFAARIYDYDPLYKEALQMLRDAGAQVSIMTYDEFKHCWDTFVDHQGCPFQPWDGLDEHSQALSGRLRAILQNQGNGSEPATSGSETPGTSTDKKYSIGLAIGTNSVGWAVITDEYKVPSKKFKVLGNTDRHSIKKNLIGALLFDSGETAEATRLKRTARRRYTRRKNRICYLQEIFSNEMAKVDDSFFHRLEESFLVEEDKKHERHPIFGNIVDEVAYHEKYPTIYHLRKKLVDSTDKADLRLIYLALAHMIKFRGHFLIEGDLNPDNSDVDKLFIQLVQTYNQLFEENPINASGVDAKAILSARLSKSRRLENLIAQLPGEKKNGLFGNLIALSLGLTPNFKSNFDLAEDAKLQLSKDTYDDDLDNLLAQIGDQYADLFLAAKNLSDAILLSDILRVNTEITKAPLSASMIKRYDEHHQDLTLLKALVRQQLPEKYKEIFFDQSKNGYAGYIDGGASQEEFYKFIKPILEKMDGTEELLVKLNREDLLRKQRTFDNGSIPHQIHLGELHAILRRQEDFYPFLKDNREKIEKILTFRIPYYVGPLARGNSRFAWMTRKSEETITPWNFEEVVDKGASAQSFIERMTNFDKNLPNEKVLPKHSLLYEYFTVYNELTKVKYVTEGMRKPAFLSGEQKKAIVDLLFKTNRKVTVKQLKEDYFKKIECFDSVEISGVEDRFNASLGTYHDLLKIIKDKDFLDNEENEDILEDIVLTLTLFEDREMIEERLKTYAHLFDDKVMKQLKRRRYTGWGRLSRKLINGIRDKQSGKTILDFLKSDGFANRNFMQLIHDDSLTFKEDIQKAQVSGQGDSLHEHIANLAGSPAIKKGILQTVKVVDELVKVMGRHKPENIVIEMARENQTTQKGQKNSRERMKRIEEGIKELGSQILKEHPVENTQLQNEKLYLYYLQNGRDMYVDQELDINRLSDYDVDHIVPQSFLKDDSIDNKVLTRSDKNRGKSDNVPSEEVVKKMKNYWRQLLNAKLITQRKFDNLTKAERGGLSELDKAGFIKRQLVETRQITKHVAQILDSRMNTKYDENDKLIREVKVITLKSKLVSDFRKDFQFYKVREINNYHHAHDAYLNAVVGTALIKKYPKLESEFVYGDYKVYDVRKMIAKSEQEIGKATAKYFFYSNIMNFFKTEITLANGEIRKRPLIETNGETGEIVWDKGRDFATVRKVLSMPQVNIVKKTEVQTGGFSKESILPKRNSDKLIARKKDWDPKKYGGFDSPTVAYSVLVVAKVEKGKSKKLKSVKELLGITIMERSSFEKNPIDFLEAKGYKEVKKDLIIKLPKYSLFELENGRKRMLASAGELQKGNELALPSKYVNFLYLASHYEKLKGSPEDNEQKQLFVEQHKHYLDEIIEQISEFSKRVILADANLDKVLSAYNKHRDKPIREQAENIIHLFTLTNLGAPAAFKYFDTTIDRKRYTSTKEVLDATLIHQSITGLYETRIDLSQLGGDGGGSPKKKRKV

SEQ ID NO: 326 - protein, 1592 aa, synthetic construct
  REGION 1..1592: note = Synthetic
MEASPASGPRHLMDPHIFTSNFNNGIGRHKTYLCYEVERLDNGTSVKMDQHRGFLHNQAKNLLCGFYGRHAELRFLDLVPSLQLDPAQIYRVTWFISWSPCFSWGCAGEVRAFLQENTHVRLRIFAARIYDYDPLYKEALQMLRDAGAQVSIMTYDEFKHCWDTFVDHQGCPFQPWDGLDEHSQALSGRLRAILQNQGNEAAAKEAAAKEAAAKDKKYSIGLAIGTNSVGWAVITDEYKVPSKKFKVLGNTDRHSIKKNLIGALLFDSGETAEATRLKRTARRRYTRRKNRICYLQEIFSNEMAKVDDSFFHRLEESFLVEEDKKHERHPIFGNIVDEVAYHEKYPTIYHLRKKLVDSTDKADLRLIYLALAHMIKFRGHFLIEGDLNPDNSDVDKLFIQLVQTYNQLFEENPINASGVDAKAILSARLSKSRRLENLIAQLPGEKKNGLFGNLIALSLGLTPNFKSNFDLAEDAKLQLSKDTYDDDLDNLLAQIGDQYADLFLAAKNLSDAILLSDILRVNTEITKAPLSASMIKRYDEHHQDLTLLKALVRQQLPEKYKEIFFDQSKNGYAGYIDGGASQEEFYKFIKPILEKMDGTEELLVKLNREDLLRKQRTFDNGSIPHQIHLGELHAILRRQEDFYPFLKDNREKIEKILTFRIPYYVGPLARGNSRFAWMTRKSEETITPWNFEEVVDKGASAQSFIERMTNFDKNLPNEKVLPKHSLLYEYFTVYNELTKVKYVTEGMRKPAFLSGEQKKAIVDLLFKTNRKVTVKQLKEDYFKKIECFDSVEISGVEDRFNASLGTYHDLLKIIKDKDFLDNEENEDILEDIVLTLTLFEDREMIEERLKTYAHLFDDKVMKQLKRRRYTGWGRLSRKLINGIRDKQSGKTILDFLKSDGFANRNFMQLIHDDSLTFKEDIQKAQVSGQGDSLHEHIANLAGSPAIKKGILQTVKVVDELVKVMGRHKPENIVIEMARENQTTQKGQKNSRERMKRIEEGIKELGSQILKEHPVENTQLQNEKLYLYYLQNGRDMYVDQELDINRLSDYDVDHIVPQSFLKDDSIDNKVLTRSDKNRGKSDNVPSEEVVKKMKNYWRQLLNAKLITQRKFDNLTKAERGGLSELDKAGFIKRQLVETRQITKHVAQILDSRMNTKYDENDKLIREVKVITLKSKLVSDFRKDFQFYKVREINNYHHAHDAYLNAVVGTALIKKYPKLESEFVYGDYKVYDVRKMIAKSEQEIGKATAKYFFYSNIMNFFKTEITLANGEIRKRPLIETNGETGEIVWDKGRDFATVRKVLSMPQVNIVKKTEVQTGGFSKESILPKRNSDKLIARKKDWDPKKYGGFDSPTVAYSVLVVAKVEKGKSKKLKSVKELLGITIMERSSFEKNPIDFLEAKGYKEVKKDLIIKLPKYSLFELENGRKRMLASAGELQKGNELALPSKYVNFLYLASHYEKLKGSPEDNEQKQLFVEQHKHYLDEIIEQISEFSKRVILADANLDKVLSAYNKHRDKPIREQAENIIHLFTLTNLGAPAAFKYFDTTIDRKRYTSTKEVLDATLIHQSITGLYETRIDLSQLGGDGGGSPKKKRKV

SEQ ID NO: 327 - protein, 1679 aa, synthetic construct
  REGION 1..1679: note = Synthetic
MEASPASGPRHLMDPHIFTSNFNNGIGRHKTYLCYEVERLDNGTSVKMDQHRGFLHNQAKNLLCGFYGRHAELRFLDLVPSLQLDPAQIYRVTWFISWSPCFSWGCAGEVRAFLQENTHVRLRIFAARIYDYDPLYKEALQMLRDAGAQVSIMTYDEFKHCWDTFVDHQGCPFQPWDGLDEHSQALSGRLRAILQNQGNGGGGSEAAAKEAAAKDKKYSIGLAIGTNSVGWAVITDEYKVPSKKFKVLGNTDRHSIKKNLIGALLFDSGETAEATRLKRTARRRYTRRKNRICYLQEIFSNEMAKVDDSFFHRLEESFLVEEDKKHERHPIFGNIVDEVAYHEKYPTIYHLRKKLVDSTDKADLRLIYLALAHMIKFRGHFLIEGDLNPDNSDVDKLFIQLVQTYNQLFEENPINASGVDAKAILSARLSKSRRLENLIAQLPGEKKNGLFGNLIALSLGLTPNFKSNFDLAEDAKLQLSKDTYDDDLDNLLAQIGDQYADLFLAAKNLSDAILLSDILRVNTEITKAPLSASMIKRYDEHHQDLTLLKALVRQQLPEKYKEIFFDQSKNGYAGYIDGGASQEEFYKFIKPILEKMDGTEELLVKLNREDLLRKQRTFDNGSIPHQIHLGELHAILRRQEDFYPFLKDNREKIEKILTFRIPYYVGPLARGNSRFAWMTRKSEETITPWNFEEVVDKGASAQSFIERMTNFDKNLPNEKVLPKHSLLYEYFTVYNELTKVKYVTEGMRKPAFLSGEQKKAIVDLLFKTNRKVTVKQLKEDYFKKIECFDSVEISGVEDRFNASLGTYHDLLKIIKDKDFLDNEENEDILEDIVLTLTLFEDREMIEERLKTYAHLFDDKVMKQLKRRRYTGWGRLSRKLINGIRDKQSGKTILDFLKSDGFANRNFMQLIHDDSLTFKEDIQKAQVSGQGDSLHEHIANLAGSPAIKKGILQTVKVVDELVKVMGRHKPENIVIEMARENQTTQKGQKNSRERMKRIEEGIKELGSQILKEHPVENTQLQNEKLYLYYLQNGRDMYVDQELDINRLSDYDVDHIVPQSFLKDDSIDNKVLTRSDKNRGKSDNVPSEEVVKKMKNYWRQLLNAKLITQRKFDNLTKAERGGLSELDKAGFIKRQLVETRQITKHVAQILDSRMNTKYDENDKLIREVKVITLKSKLVSDFRKDFQFYKVREINNYHHAHDAYLNAVVGTALIKKYPKLESEFVYGDYKVYDVRKMIAKSEQEIGKATAKYFFYSNIMNFFKTEITLANGEIRKRPLIETNGETGEIVWDKGRDFATVRKVLSMPQVNIVKKTEVQTGGFSKESILPKRNSDKLIARKKDWDPKKYGGFDSPTVAYSVLVVAKVEKGKSKKLKSVKELLGITIMERSSFEKNPIDFLEAKGYKEVKKDLIIKLPKYSLFELENGRKRMLASAGELQKGNELALPSKYVNFLYLASHYEKLKGSPEDNEQKQLFVEQHKHYLDEIIEQISEFSKRVILADANLDKVLSAYNKHRDKPIREQAENIIHLFTLTNLGAPAAFKYFDTTIDRKRYTSTKEVLDATLIHQSITGLYETRIDLSQLGGDSGGSTNLSDIIEKETGKQLVIQESILMLPEEVEEVIGNKPESDILVHTAYDESTDENVMLLTSDAPEYKPWALVIQDSNGENKIKMLSGGSPKKKRKV

SEQ ID NO: 328 - protein, 1679 aa, synthetic construct
  REGION 1..1679: note = Synthetic
MEASPASGPRHLMDPHIFTSNFNNGIGRHKTYLCYEVERLDNGTSVKMDQHRGFLHNQAKNLLCGFYGRHAELRFLDLVPSLQLDPAQIYRVTWFISWSPCFSWGCAGEVRAFLQENTHVRLRIFAARIYDYDPLYKEALQMLRDAGAQVSIMTYDEFKHCWDTFVDHQGCPFQPWDGLDEHSQALSGRLRAILQNQGNEAAAKGGGGSGGGGSDKKYSIGLAIGTNSVGWAVITDEYKVPSKKFKVLGNTDRHSIKKNLIGALLFDSGETAEATRLKRTARRRYTRRKNRICYLQEIFSNEMAKVDDSFFHRLEESFLVEEDKKHERHPIFGNIVDEVAYHEKYPTIYHLRKKLVDSTDKADLRLIYLALAHMIKFRGHFLIEGDLNPDNSDVDKLFIQLVQTYNQLFEENPINASGVDAKAILSARLSKSRRLENLIAQLPGEKKNGLFGNLIALSLGLTPNFKSNFDLAEDAKLQLSKDTYDDDLDNLLAQIGDQYADLFLAAKNLSDAILLSDILRVNTEITKAPLSASMIKRYDEHHQDLTLLKALVRQQLPEKYKEIFFDQSKNGYAGYIDGGASQEEFYKFIKPILEKMDGTEELLVKLNREDLLRKQRTFDNGSIPHQIHLGELHAILRRQEDFYPFLKDNREKIEKILTFRIPYYVGPLARGNSRFAWMTRKSEETITPWNFEEVVDKGASAQSFIERMTNFDKNLPNEKVLPKHSLLYEYFTVYNELTKVKYVTEGMRKPAFLSGEQKKAIVDLLFKTNRKVTVKQLKEDYFKKIECFDSVEISGVEDRFNASLGTYHDLLKIIKDKDFLDNEENEDILEDIVLTLTLFEDREMIEERLKTYAHLFDDKVMKQLKRRRYTGWGRLSRKLINGIRDKQSGKTILDFLKSDGFANRNFMQLIHDDSLTFKEDIQKAQVSGQGDSLHEHIANLAGSPAIKKGILQTVKVVDELVKVMGRHKPENIVIEMARENQTTQKGQKNSRERMKRIEEGIKELGSQILKEHPVENTQLQNEKLYLYYLQNGRDMYVDQELDINRLSDYDVDHIVPQSFLKDDSIDNKVLTRSDKNRGKSDNVPSEEVVKKMKNYWRQLLNAKLITQRKFDNLTKAERGGLSELDKAGFIKRQLVETRQITKHVAQILDSRMNTKYDENDKLIREVKVITLKSKLVSDFRKDFQFYKVREINNYHHAHDAYLNAVVGTALIKKYPKLESEFVYGDYKVYDVRKMIAKSEQEIGKATAKYFFYSNIMNFFKTEITLANGEIRKRPLIETNGETGEIVWDKGRDFATVRKVLSMPQVNIVKKTEVQTGGFSKESILPKRNSDKLIARKKDWDPKKYGGFDSPTVAYSVLVVAKVEKGKSKKLKSVKELLGITIMERSSFEKNPIDFLEAKGYKEVKKDLIIKLPKYSLFELENGRKRMLASAGELQKGNELALPSKYVNFLYLASHYEKLKGSPEDNEQKQLFVEQHKHYLDEIIEQISEFSKRVILADANLDKVLSAYNKHRDKPIREQAENIIHLFTLTNLGAPAAFKYFDTTIDRKRYTSTKEVLDATLIHQSITGLYETRIDLSQLGGDSGGSTNLSDIIEKETGKQLVIQESILMLPEEVEEVIGNKPESDILVHTAYDESTDENVMLLTSDAPEYKPWALVIQDSNGENKIKMLSGGSPKKKRKV

SEQ ID NO: 329 - protein, 1679 aa, synthetic construct
  REGION 1..1679: note = Synthetic
MEASPASGPRHLMDPHIFTSNFNNGIGRHKTYLCYEVERLDNGTSVKMDQHRGFLHNQAKNLLCGFYGRHAELRFLDLVPSLQLDPAQIYRVTWFISWSPCFSWGCAGEVRAFLQENTHVRLRIFAARIYDYDPLYKEALQMLRDAGAQVSIMTYDEFKHCWDTFVDHQGCPFQPWDGLDEHSQALSGRLRAILQNQGNEAAAKEAAAKEAAAKDKKYSIGLAIGTNSVGWAVITDEYKVPSKKFKVLGNTDRHSIKKNLIGALLFDSGETAEATRLKRTARRRYTRRKNRICYLQEIFSNEMAKVDDSFFHRLEESFLVEEDKKHERHPIFGNIVDEVAYHEKYPTIYHLRKKLVDSTDKADLRLIYLALAHMIKFRGHFLIEGDLNPDNSDVDKLFIQLVQTYNQLFEENPINASGVDAKAILSARLSKSRRLENLIAQLPGEKKNGLFGNLIALSLGLTPNFKSNFDLAEDAKLQLSKDTYDDDLDNLLAQIGDQYADLFLAAKNLSDAILLSDILRVNTEITKAPLSASMIKRYDEHHQDLTLLKALVRQQLPEKYKEIFFDQSKNGYAGYIDGGASQEEFYKFIKPILEKMDGTEELLVKLNREDLLRKQRTFDNGSIPHQIHLGELHAILRRQEDFYPFLKDNREKIEKILTFRIPYYVGPLARGNSRFAWMTRKSEETITPWNFEEVVDKGASAQSFIERMTNFDKNLPNEKVLPKHSLLYEYFTVYNELTKVKYVTEGMRKPAFLSGEQKKAIVDLLFKTNRKVTVKQLKEDYFKKIECFDSVEISGVEDRFNASLGTYHDLLKIIKDKDFLDNEENEDILEDIVLTLTLFEDREMIEERLKTYAHLFDDKVMKQLKRRRYTGWGRLSRKLINGIRDKQSGKTILDFLKSDGFANRNFMQLIHDDSLTFKEDIQKAQVSGQGDSLHEHIANLAGSPAIKKGILQTVKVVDELVKVMGRHKPENIVIEMARENQTTQKGQKNSRERMKRIEEGIKELGSQILKEHPVENTQLQNEKLYLYYLQNGRDMYVDQELDINRLSDYDVDHIVPQSFLKDDSIDNKVLTRSDKNRGKSDNVPSEEVVKKMKNYWRQLLNAKLITQRKFDNLTKAERGGLSELDKAGFIKRQLVETRQITKHVAQILDSRMNTKYDENDKLIREVKVITLKSKLVSDFRKDFQFYKVREINNYHHAHDAYLNAVVGTALIKKYPKLESEFVYGDYKVYDVRKMIAKSEQEIGKATAKYFFYSNIMNFFKTEITLANGEIRKRPLIETNGETGEIVWDKGRDFATVRKVLSMPQVNIVKKTEVQTGGFSKESILPKRNSDKLIARKKDWDPKKYGGFDSPTVAYSVLVVAKVEKGKSKKLKSVKELLGITIMERSSFEKNPIDFLEAKGYKEVKKDLIIKLPKYSLFELENGRKRMLASAGELQKGNELALPSKYVNFLYLASHYEKLKGSPEDNEQKQLFVEQHKHYLDEIIEQISEFSKRVILADANLDKVLSAYNKHRDKPIREQAENIIHLFTLTNLGAPAAFKYFDTTIDRKRYTSTKEVLDATLIHQSITGLYETRIDLSQLGGDSGGSTNLSDIIEKETGKQLVIQESILMLPEEVEEVIGNKPESDILVHTAYDESTDENVMLLTSDAPEYKPWALVIQDSNGENKIKMLSGGSPKKKRKV

SEQ ID NO: 330 - protein, 1684 aa, synthetic construct
  REGION 1..1684: note = Synthetic
MEASPASGPRHLMDPHIFTSNFNNGIGRHKTYLCYEVERLDNGTSVKMDQHRGFLHNQAKNLLCGFYGRHAELRFLDLVPSLQLDPAQIYRVTWFISWSPCFSWGCAGEVRAFLQENTHVRLRIFAARIYDYDPLYKEALQMLRDAGAQVSIMTYDEFKHCWDTFVDHQGCPFQPWDGLDEHSQALSGRLRAILQNQGNGGGGSGGGGSGGGGSGGGGSDKKYSIGLAIGTNSVGWAVITDEYKVPSKKFKVLGNTDRHSIKKNLIGALLFDSGETAEATRLKRTARRRYTRRKNRICYLQEIFSNEMAKVDDSFFHRLEESFLVEEDKKHERHPIFGNIVDEVAYHEKYPTIYHLRKKLVDSTDKADLRLIYLALAHMIKFRGHFLIEGDLNPDNSDVDKLFIQLVQTYNQLFEENPINASGVDAKAILSARLSKSRRLENLIAQLPGEKKNGLFGNLIALSLGLTPNFKSNFDLAEDAKLQLSKDTYDDDLDNLLAQIGDQYADLFLAAKNLSDAILLSDILRVNTEITKAPLSASMIKRYDEHHQDLTLLKALVRQQLPEKYKEIFFDQSKNGYAGYIDGGASQEEFYKFIKPILEKMDGTEELLVKLNREDLLRKQRTFDNGSIPHQIHLGELHAILRRQEDFYPFLKDNREKIEKILTFRIPYYVGPLARGNSRFAWMTRKSEETITPWNFEEVVDKGASAQSFIERMTNFDKNLPNEKVLPKHSLLYEYFTVYNELTKVKYVTEGMRKPAFLSGEQKKAIVDLLFKTNRKVTVKQLKEDYFKKIECFDSVEISGVEDRFNASLGTYHDLLKIIKDKDFLDNEENEDILEDIVLTLTLFEDREMIEERLKTYAHLFDDKVMKQLKRRRYTGWGRLSRKLINGIRDKQSGKTILDFLKSDGFANRNFMQLIHDDSLTFKEDIQKAQVSGQGDSLHEHIANLAGSPAIKKGILQTVKVVDELVKVMGRHKPENIVIEMARENQTTQKGQKNSRERMKRIEEGIKELGSQILKEHPVENTQLQNEKLYLYYLQNGRDMYVDQELDINRLSDYDVDHIVPQSFLKDDSIDNKVLTRSDKNRGKSDNVPSEEVVKKMKNYWRQLLNAKLITQRKFDNLTKAERGGLSELDKAGFIKRQLVETRQITKHVAQILDSRMNTKYDENDKLIREVKVITLKSKLVSDFRKDFQFYKVREINNYHHAHDAYLNAVVGTALIKKYPKLESEFVYGDYKVYDVRKMIAKSEQEIGKATAKYFFYSNIMNFFKTEITLANGEIRKRPLIETNGETGEIVWDKGRDFATVRKVLSMPQVNIVKKTEVQTGGFSKESILPKRNSDKLIARKKDWDPKKYGGFDSPTVAYSVLVVAKVEKGKSKKLKSVKELLGITIMERSSFEKNPIDFLEAKGYKEVKKDLIIKLPKYSLFELENGRKRMLASAGELQKGNELALPSKYVNFLYLASHYEKLKGSPEDNEQKQLFVEQHKHYLDEIIEQISEFSKRVILADANLDKVLSAYNKHRDKPIREQAENIIHLFTLTNLGAPAAFKYFDTTIDRKRYTSTKEVLDATLIHQSITGLYETRIDLSQLGGDSGGSTNLSDIIEKETGKQLVIQESILMLPEEVEEVIGNKPESDILVHTAYDESTDENVMLLTSDAPEYKPWALVIQDSNGENKIKMLSGGSPKKKRKV

SEQ ID NO: 331 - protein, 1684 aa, synthetic construct
  REGION 1..1684: note = Synthetic
MEASPASGPRHLMDPHIFTSNFNNGIGRHKTYLCYEVERLDNGTSVKMDQHRGFLHNQAKNLLCGFYGRHAELRFLDLVPSLQLDPAQIYRVTWFISWSPCFSWGCAGEVRAFLQENTHVRLRIFAARIYDYDPLYKEALQMLRDAGAQVSIMTYDEFKHCWDTFVDHQGCPFQPWDGLDEHSQALSGRLRAILQNQGNGGGGSGGGGSEAAAKEAAAKDKKYSIGLAIGTNSVGWAVITDEYKVPSKKFKVLGNTDRHSIKKNLIGALLFDSGETAEATRLKRTARRRYTRRKNRICYLQEIFSNEMAKVDDSFFHRLEESFLVEEDKKHERHPIFGNIVDEVAYHEKYPTIYHLRKKLVDSTDKADLRLIYLALAHMIKFRGHFLIEGDLNPDNSDVDKLFIQLVQTYNQLFEENPINASGVDAKAILSARLSKSRRLENLIAQLPGEKKNGLFGNLIALSLGLTPNFKSNFDLAEDAKLQLSKDTYDDDLDNLLAQIGDQYADLFLAAKNLSDAILLSDILRVNTEITKAPLSASMIKRYDEHHQDLTLLKALVRQQLPEKYKEIFFDQSKNGYAGYIDGGASQEEFYKFIKPILEKMDGTEELLVKLNREDLLRKQRTFDNGSIPHQIHLGELHAILRRQEDFYPFLKDNREKIEKILTFRIPYYVGPLARGNSRFAWMTRKSEETITPWNFEEVVDKGASAQSFIERMTNFDKNLPNEKVLPKHSLLYEYFTVYNELTKVKYVTEGMRKPAFLSGEQKKAIVDLLFKTNRKVTVKQLKEDYFKKIECFDSVEISGVEDRFNASLGTYHDLLKIIKDKDFLDNEENEDILEDIVLTLTLFEDREMIEERLKTYAHLFDDKVMKQLKRRRYTGWGRLSRKLINGIRDKQSGKTILDFLKSDGFANRNFMQLIHDDSLTFKEDIQKAQVSGQGDSLHEHIANLAGSPAIKKGILQTVKVVDELVKVMGRHKPENIVIEMARENQTTQKGQKNSRERMKRIEEGIKELGSQILKEHPVENTQLQNEKLYLYYLQNGRDMYVDQELDINRLSDYDVDHIVPQSFLKDDSIDNKVLTRSDKNRGKSDNVPSEEVVKKMKNYWRQLLNAKLITQRKFDNLTKAERGGLSELDKAGFIKRQLVETRQITKHVAQILDSRMNTKYDENDKLIREVKVITLKSKLVSDFRKDFQFYKVREINNYHHAHDAYLNAVVGTALIKKYPKLESEFVYGDYKVYDVRKMIAKSEQEIGKATAKYFFYSNIMNFFKTEITLANGEIRKRPLIETNGETGEIVWDKGRDFATVRKVLSMPQVNIVKKTEVQTGGFSKESILPKRNSDKLIARKKDWDPKKYGGFDSPTVAYSVLVVAKVEKGKSKKLKSVKELLGITIMERSSFEKNPIDFLEAKGYKEVKKDLIIKLPKYSLFELENGRKRMLASAGELQKGNELALPSKYVNFLYLASHYEKLKGSPEDNEQKQLFVEQHKHYLDEIIEQISEFSKRVILADANLDKVLSAYNKHRDKPIREQAENIIHLFTLTNLGAPAAFKYFDTTIDRKRYTSTKEVLDATLIHQSITGLYETRIDLSQLGGDSGGSTNLSDIIEKETGKQLVIQESILMLPEEVEEVIGNKPESDILVHTAYDESTDENVMLLTSDAPEYKPWALVIQDSNGENKIKMLSGGSPKKKRKV

SEQ ID NO: 332 - protein, 1684 aa, synthetic construct
  REGION 1..1684: note = Synthetic
MEASPASGPRHLMDPHIFTSNFNNGIGRHKTYLCYEVERLDNGTSVKMDQHRGFLHNQAKNLLCGFYGRHAELRFLDLVPSLQLDPAQIYRVTWFISWSPCFSWGCAGEVRAFLQENTHVRLRIFAARIYDYDPLYKEALQMLRDAGAQVSIMTYDEFKHCWDTFVDHQGCPFQPWDGLDEHSQALSGRLRAILQNQGNGGGGSEAAAKGGGGSGGGGSDKKYSIGLAIGTNSVGWAVITDEYKVPSKKFKVLGNTDRHSIKKNLIGALLFDSGETAEATRLKRTARRRYTRRKNRICYLQEIFSNEMAKVDDSFFHRLEESFLVEEDKKHERHPIFGNIVDEVAYHEKYPTIYHLRKKLVDSTDKADLRLIYLALAHMIKFRGHFLIEGDLNPDNSDVDKLFIQLVQTYNQLFEENPINASGVDAKAILSARLSKSRRLENLIAQLPGEKKNGLFGNLIALSLGLTPNFKSNFDLAEDAKLQLSKDTYDDDLDNLLAQIGDQYADLFLAAKNLSDAILLSDILRVNTEITKAPLSASMIKRYDEHHQDLTLLKALVRQQLPEKYKEIFFDQSKNGYAGYIDGGASQEEFYKFIKPILEKMDGTEELLVKLNREDLLRKQRTFDNGSIPHQIHLGELHAILRRQEDFYPFLKDNREKIEKILTFRIPYYVGPLARGNSRFAWMTRKSEETITPWNFEEVVDKGASAQSFIERMTNFDKNLPNEKVLPKHSLLYEYFTVYNELTKVKYVTEGMRKPAFLSGEQKKAIVDLLFKTNRKVTVKQLKEDYFKKIECFDSVEISGVEDRFNASLGTYHDLLKIIKDKDFLDNEENEDILEDIVLTLTLFEDREMIEERLKTYAHLFDDKVMKQLKRRRYTGWGRLSRKLINGIRDKQSGKTILDFLKSDGFANRNFMQLIHDDSLTFKEDIQKAQVSGQGDSLHEHIANLAGSPAIKKGILQTVKVVDELVKVMGRHKPENIVIEMARENQTTQKGQKNSRERMKRIEEGIKELGSQILKEHPVENTQLQNEKLYLYYLQNGRDMYVDQELDINRLSDYDVDHIVPQSFLKDDSIDNKVLTRSDKNRGKSDNVPSEEVVKKMKNYWRQLLNAKLITQRKFDNLTKAERGGLSELDKAGFIKRQLVETRQITKHVAQILDSRMNTKYDENDKLIREVKVITLKSKLVSDFRKDFQFYKVREINNYHHAHDAYLNAVVGTALIKKYPKLESEFVYGDYKVYDVRKMIAKSEQEIGKATAKYFFYSNIMNFFKTEITLANGEIRKRPLIETNGETGEIVWDKGRDFATVRKVLSMPQVNIVKKTEVQTGGFSKESILPKRNSDKLIARKKDWDPKKYGGFDSPTVAYSVLVVAKVEKGKSKKLKSVKELLGITIMERSSFEKNPIDFLEAKGYKEVKKDLIIKLPKYSLFELENGRKRMLASAGELQKGNELALPSKYVNFLYLASHYEKLKGSPEDNEQKQLFVEQHKHYLDEIIEQISEFSKRVILADANLDKVLSAYNKHRDKPIREQAENIIHLFTLTNLGAPAAFKYFDTTIDRKRYTSTKEVLDATLIHQSITGLYETRIDLSQLGGDSGGSTNLSDIIEKETGKQLVIQESILMLPEEVEEVIGNKPESDILVHTAYDESTDENVMLLTSDAPEYKPWALVIQDSNGENKIKMLSGGSPKKKRKV

SEQ ID NO: 333 - protein, 1684 aa, synthetic construct
  REGION 1..1684: note = Synthetic
MEASPASGPRHLMDPHIFTSNFNNGIGRHKTYLCYEVERLDNGTSVKMDQHRGFLHNQAKNLLCGFYGRHAELRFLDLVPSLQLDPAQIYRVTWFISWSPCFSWGCAGEVRAFLQENTHVRLRIFAARIYDYDPLYKEALQMLRDAGAQVSIMTYDEFKHCWDTFVDHQGCPFQPWDGLDEHSQALSGRLRAILQNQGNEAAAKEAAAKEAAAKEAAAKDKKYSIGLAIGTNSVGWAVITDEYKVPSKKFKVLGNTDRHSIKKNLIGALLFDSGETAEATRLKRTARRRYTRRKNRICYLQEIFSNEMAKVDDSFFHRLEESFLVEEDKKHERHPIFGNIVDEVAYHEKYPTIYHLRKKLVDSTDKADLRLIYLALAHMIKFRGHFLIEGDLNPDNSDVDKLFIQLVQTYNQLFEENPINASGVDAKAILSARLSKSRRLENLIAQLPGEKKNGLFGNLIALSLGLTPNFKSNFDLAEDAKLQLSKDTYDDDLDNLLAQIGDQYADLFLAAKNLSDAILLSDILRVNTEITKAPLSASMIKRYDEHHQDLTLLKALVRQQLPEKYKEIFFDQSKNGYAGYIDGGASQEEFYKFIKPILEKMDGTEELLVKLNREDLLRKQRTFDNGSIPHQIHLGELHAILRRQEDFYPFLKDNREKIEKILTFRIPYYVGPLARGNSRFAWMTRKSEETITPWNFEEVVDKGASAQSFIERMTNFDKNLPNEKVLPKHSLLYEYFTVYNELTKVKYVTEGMRKPAFLSGEQKKAIVDLLFKTNRKVTVKQLKEDYFKKIECFDSVEISGVEDRFNASLGTYHDLLKIIKDKDFLDNEENEDILEDIVLTLTLFEDREMIEERLKTYAHLFDDKVMKQLKRRRYTGWGRLSRKLINGIRDKQSGKTILDFLKSDGFANRNFMQLIHDDSLTFKEDIQKAQVSGQGDSLHEHIANLAGSPAIKKGILQTVKVVDELVKVMGRHKPENIVIEMARENQTTQKGQKNSRERMKRIEEGIKELGSQILKEHPVENTQLQNEKLYLYYLQNGRDMYVDQELDINRLSDYDVDHIVPQSFLKDDSIDNKVLTRSDKNRGKSDNVPSEEVVKKMKNYWRQLLNAKLITQRKFDNLTKAERGGLSELDKAGFIKRQLVETRQITKHVAQILDSRMNTKYDENDKLIREVKVITLKSKLVSDFRKDFQFYKVREINNYHHAHDAYLNAVVGTALIKKYPKLESEFVYGDYKVYDVRKMIAKSEQEIGKATAKYFFYSNIMNFFKTEITLANGEIRKRPLIETNGETGEIVWDKGRDFATVRKVLSMPQVNIVKKTEVQTGGFSKESILPKRNSDKLIARKKDWDPKKYGGFDSPTVAYSVLVVAKVEKGKSKKLKSVKELLGITIMERSSFEKNPIDFLEAKGYKEVKKDLIIKLPKYSLFELENGRKRMLASAGELQKGNELALPSKYVNFLYLASHYEKLKGSPEDNEQKQLFVEQHKHYLDEIIEQISEFSKRVILADANLDKVLSAYNKHRDKPIREQAENIIHLFTLTNLGAPAAFKYFDTTIDRKRYTSTKEVLDATLIHQSITGLYETRIDLSQLGGDSGGSTNLSDIIEKETGKQLVIQESILMLPEEVEEVIGNKPESDILVHTAYDESTDENVMLLTSDAPEYKPWALVIQDSNGENKIKMLSGGSPKKKRKV

SEQ ID NO: 334 - protein, 1689 aa, synthetic construct
  REGION 1..1689: note = Synthetic
MEASPASGPRHLMDPHIFTSNFNNGIGRHKTYLCYEVERLDNGTSVKMDQHRGFLHNQAKNLLCGFYGRHAELRFLDLVPSLQLDPAQIYRVTWFISWSPCFSWGCAGEVRAFLQENTHVRLRIFAARIYDYDPLYKEALQMLRDAGAQVSIMTYDEFKHCWDTFVDHQGCPFQPWDGLDEHSQALSGRLRAILQNQGNGGGGSEAAAKEAAAKGGGGSEAAAKDKKYSIGLAIGTNSVGWAVITDEYKVPSKKFKVLGNTDRHSIKKNLIGALLFDSGETAEATRLKRTARRRYTRRKNRICYLQEIFSNEMAKVDDSFFHRLEESFLVEEDKKHERHPIFGNIVDEVAYHEKYPTIYHLRKKLVDSTDKADLRLIYLALAHMIKFRGHFLIEGDLNPDNSDVDKLFIQLVQTYNQLFEENPINASGVDAKAILSARLSKSRRLENLIAQLPGEKKNGLFGNLIALSLGLTPNFKSNFDLAEDAKLQLSKDTYDDDLDNLLAQIGDQYADLFLAAKNLSDAILLSDILRVNTEITKAPLSASMIKRYDEHHQDLTLLKALVRQQLPEKYKEIFFDQSKNGYAGYIDGGASQEEFYKFIKPILEKMDGTEELLVKLNREDLLRKQRTFDNGSIPHQIHLGELHAILRRQEDFYPFLKDNREKIEKILTFRIPYYVGPLARGNSRFAWMTRKSEETITPWNFEEVVDKGASAQSFIERMTNFDKNLPNEKVLPKHSLLYEYFTVYNELTKVKYVTEGMRKPAFLSGEQKKAIVDLLFKTNRKVTVKQLKEDYFKKIECFDSVEISGVEDRFNASLGTYHDLLKIIKDKDFLDNEENEDILEDIVLTLTLFEDREMIEERLKTYAHLFDDKVMKQLKRRRYTGWGRLSRKLINGIRDKQSGKTILDFLKSDGFANRNFMQLIHDDSLTFKEDIQKAQVSGQGDSLHEHIANLAGSPAIKKGILQTVKVVDELVKVMGRHKPENIVIEMARENQTTQKGQKNSRERMKRIEEGIKELGSQILKEHPVENTQLQNEKLYLYYLQNGRDMYVDQELDINRLSDYDVDHIVPQSFLKDDSIDNKVLTRSDKNRGKSDNVPSEEVVKKMKNYWRQLLNAKLITQRKFDNLTKAERGGLSELDKAGFIKRQLVETRQITKHVAQILDSRMNTKYDENDKLIREVKVITLKSKLVSDFRKDFQFYKVREINNYHHAHDAYLNAVVGTALIKKYPKLESEFVYGDYKVYDVRKMIAKSEQEIGKATAKYFFYSNIMNFFKTEITLANGEIRKRPLIETNGETGEIVWDKGRDFATVRKVLSMPQVNIVKKTEVQTGGFSKESILPKRNSDKLIARKKDWDPKKYGGFDSPTVAYSVLVVAKVEKGKSKKLKSVKELLGITIMERSSFEKNPIDFLEAKGYKEVKKDLIIKLPKYSLFELENGRKRMLASAGELQKGNELALPSKYVNFLYLASHYEKLKGSPEDNEQKQLFVEQHKHYLDEIIEQISEFSKRVILADANLDKVLSAYNKHRDKPIREQAENIIHLFTLTNLGAPAAFKYFDTTIDRKRYTSTKEVLDATLIHQSITGLYETRIDLSQLGGDSGGSTNLSDIIEKETGKQLVIQESILMLPEEVEEVIGNKPESDILVHTAYDESTDENVMLLTSDAPEYKPWALVIQDSNGENKIKMLSGGSPKKKRKV

SEQ ID NO: 335 - protein, 1689 aa, synthetic construct
  REGION 1..1689: note = Synthetic
MEASPASGPRHLMDPHIFTSNFNNGIGRHKTYLCYEVERLDNGTSVKMDQHRGFLHNQAKNLLCGFYGRHAELRFLDLVPSLQLDPAQIYRVTWFISWSPCFSWGCAGEVRAFLQENTHVRLRIFAARIYDYDPLYKEALQMLRDAGAQVSIMTYDEFKHCWDTFVDHQGCPFQPWDGLDEHSQALSGRLRAILQNQGNEAAAKEAAAKGGGGSGGGGSGGGGSDKKYSIGLAIGTNSVGWAVITDEYKVPSKKFKVLGNTDRHSIKKNLIGALLFDSGETAEATRLKRTARRRYTRRKNRICYLQEIFSNEMAKVDDSFFHRLEESFLVEEDKKHERHPIFGNIVDEVAYHEKYPTIYHLRKKLVDSTDKADLRLIYLALAHMIKFRGHFLIEGDLNPDNSDVDKLFIQLVQTYNQLFEENPINASGVDAKAILSARLSKSRRLENLIAQLPGEKKNGLFGNLIALSLGLTPNFKSNFDLAEDAKLQLSKDTYDDDLDNLLAQIGDQYADLFLAAKNLSDAILLSDILRVNTEITKAPLSASMIKRYDEHHQDLTLLKALVRQQLPEKYKEIFFDQSKNGYAGYIDGGASQEEFYKFIKPILEKMDGTEELLVKLNREDLLRKQRTFDNGSIPHQIHLGELHAILRRQEDFYPFLKDNREKIEKILTFRIPYYVGPLARGNSRFAWMTRKSEETITPWNFEEVVDKGASAQSFIERMTNFDKNLPNEKVLPKHSLLYEYFTVYNELTKVKYVTEGMRKPAFLSGEQKKAIVDLLFKTNRKVTVKQLKEDYFKKIECFDSVEISGVEDRFNASLGTYHDLLKIIKDKDFLDNEENEDILEDIVLTLTLFEDREMIEERLKTYAHLFDDKVMKQLKRRRYTGWGRLSRKLINGIRDKQSGKTILDFLKSDGFANRNFMQLIHDDSLTFKEDIQKAQVSGQGDSLHEHIANLAGSPAIKKGILQTVKVVDELVKVMGRHKPENIVIEMARENQTTQKGQKNSRERMKRIEEGIKELGSQILKEHPVENTQLQNEKLYLYYLQNGRDMYVDQELDINRLSDYDVDHIVPQSFLKDDSIDNKVLTRSDKNRGKSDNVPSEEVVKKMKNYWRQLLNAKLITQRKFDNLTKAERGGLSELDKAGFIKRQLVETRQITKHVAQILDSRMNTKYDENDKLIREVKVITLKSKLVSDFRKDFQFYKVREINNYHHAHDAYLNAVVGTALIKKYPKLESEFVYGDYKVYDVRKMIAKSEQEIGKATAKYFFYSNIMNFFKTEITLANGEIRKRPLIETNGETGEIVWDKGRDFATVRKVLSMPQVNIVKKTEVQTGGFSKESILPKRNSDKLIARKKDWDPKKYGGFDSPTVAYSVLVVAKVEKGKSKKLKSVKELLGITIMERSSFEKNPIDFLEAKGYKEVKKDLIIKLPKYSLFELENGRKRMLASAGELQKGNELALPSKYVNFLYLASHYEKLKGSPEDNEQKQLFVEQHKHYLDEIIEQISEFSKRVILADANLDKVLSAYNKHRDKPIREQAENIIHLFTLTNLGAPAAFKYFDTTIDRKRYTSTKEVLDATLIHQSITGLYETRIDLSQLGGDSGGSTNLSDIIEKETGKQLVIQESILMLPEEVEEVIGNKPESDILVHTAYDESTDENVMLLTSDAPEYKPWALVIQDSNGENKIKMLSGGSPKKKRKV

SEQ ID NO: 336 - protein, 1689 aa, synthetic construct
  REGION 1..1689: note = Synthetic
MEASPASGPRHLMDPHIFTSNFNNGIGRHKTYLCYEVERLDNGTSVKMDQHRGFLHNQAKNLLCGFYGRHAELRFLDLVPSLQLDPAQIYRVTWFISWSPCFSWGCAGEVRAFLQENTHVRLRIFAARIYDYDPLYKEALQMLRDAGAQVSIMTYDEFKHCWDTFVDHQGCPFQPWDGLDEHSQALSGRLRAILQNQGNEAAAKEAAAKGGGGSGGGGSEAAAKDKKYSIGLAIGTNSVGWAVITDEYKVPSKKFKVLGNTDRHSIKKNLIGALLFDSGETAEATRLKRTARRRYTRRKNRICYLQEIFSNEMAKVDDSFFHRLEESFLVEEDKKHERHPIFGNIVDEVAYHEKYPTIYHLRKKLVDSTDKADLRLIYLALAHMIKFRGHFLIEGDLNPDNSDVDKLFIQLVQTYNQLFEENPINASGVDAKAILSARLSKSRRLENLIAQLPGEKKNGLFGNLIALSLGLTPNFKSNFDLAEDAKLQLSKDTYDDDLDNLLAQIGDQYADLFLAAKNLSDAILLSDILRVNTEITKAPLSASMIKRYDEHHQDLTLLKALVRQQLPEKYKEIFFDQSKNGYAGYIDGGASQEEFYKFIKPILEKMDGTEELLVKLNREDLLRKQRTFDNGSIPHQIHLGELHAILRRQEDFYPFLKDNREKIEKILTFRIPYYVGPLARGNSRFAWMTRKSEETITPWNFEEVVDKGASAQSFIERMTNFDKNLPNEKVLPKHSLLYEYFTVYNELTKVKYVTEGMRKPAFLSGEQKKAIVDLLFKTNRKVTVKQLKEDYFKKIECFDSVEISGVEDRFNASLGTYHDLLKIIKDKDFLDNEENEDILEDIVLTLTLFEDREMIEERLKTYAHLFDDKVMKQLKRRRYTGWGRLSRKLINGIRDKQSGKTILDFLKSDGFANRNFMQLIHDDSLTFKEDIQKAQVSGQGDSLHEHIANLAGSPAIKKGILQTVKVVDELVKVMGRHKPENIVIEMARENQTTQKGQKNSRERMKRIEEGIKELGSQILKEHPVENTQLQNEKLYLYYLQNGRDMYVDQELDINRLSDYDVDHIVPQSFLKDDSIDNKVLTRSDKNRGKSDNVPSEEVVKKMKNYWRQLLNAKLITQRKFDNLTKAERGGLSELDKAGFIKRQLVETRQITKHVAQILDSRMNTKYDENDKLIREVKVITLKSKLVSDFRKDFQFYKVREINNYHHAHDAYLNAVVGTALIKKYPKLESEFVYGDYKVYDVRKMIAKSEQEIGKATAKYFFYSNIMNFFKTEITLANGEIRKRPLIETNGETGEIVWDKGRDFATVRKVLSMPQVNIVKKTEVQTGGFSKESILPKRNSDKLIARKKDWDPKKYGGFDSPTVAYSVLVVAKVEKGKSKKLKSVKELLGITIMERSSFEKNPIDFLEAKGYKEVKKDLIIKLPKYSLFELENGRKRMLASAGELQKGNELALPSKYVNFLYLASHYEKLKGSPEDNEQKQLFVEQHKHYLDEIIEQISEFSKRVILADANLDKVLSAYNKHRDKPIREQAENIIHLFTLTNLGAPAAFKYFDTTIDRKRYTSTKEVLDATLIHQSITGLYETRIDLSQLGGDSGGSTNLSDIIEKETGKQLVIQESILMLPEEVEEVIGNKPESDILVHTAYDESTDENVMLLTSDAPEYKPWALVIQDSNGENKIKMLSGGSPKKKRKV

SEQ ID NO: 337 - protein, 1689 aa, synthetic construct
  REGION 1..1689: note = Synthetic
MEASPASGPRHLMDPHIFTSNFNNGIGRHKTYLCYEVERLDNGTSVKMDQHRGFLHNQAKNLLCGFYGRHAELRFLDLVPSLQLDPAQIYRVTWFISWSPCFSWGCAGEVRAFLQENTHVRLRIFAARIYDYDPLYKEALQMLRDAGAQVSIMTYDEFKHCWDTFVDHQGCPFQPWDGLDEHSQALSGRLRAILQNQGNEAAAKEAAAKEAAAKGGGGSGGGGSDKKYSIGLAIGTNSVGWAVITDEYKVPSKKFKVLGNTDRHSIKKNLIGALLFDSGETAEATRLKRTARRRYTRRKNRICYLQEIFSNEMAKVDDSFFHRLEESFLVEEDKKHERHPIFGNIVDEVAYHEKYPTIYHLRKKLVDSTDKADLRLIYLALAHMIKFRGHFLIEGDLNPDNSDVDKLFIQLVQTYNQLFEENPINASGVDAKAILSARLSKSRRLENLIAQLPGEKKNGLFGNLIALSLGLTPNFKSNFDLAEDAKLQLSKDTYDDDLDNLLAQIGDQYADLFLAAKNLSDAILLSDILRVNTEITKAPLSASMIKRYDEHHQDLTLLKALVRQQLPEKYKEIFFDQSKNGYAGYIDGGASQEEFYKFIKPILEKMDGTEELLVKLNREDLLRKQRTFDNGSIPHQIHLGELHAILRRQEDFYPFLKDNREKIEKILTFRIPYYVGPLARGNSRFAWMTRKSEETITPWNFEEVVDKGASAQSFIERMTNFDKNLPNEKVLPKHSLLYEYFTVYNELTKVKYVTEGMRKPAFLSGEQKKAIVDLLFKTNRKVTVKQLKEDYFKKIECFDSVEISGVEDRFNASLGTYHDLLKIIKDKDFLDNEENEDILEDIVLTLTLFEDREMIEERLKTYAHLFDDKVMKQLKRRRYTGWGRLSRKLINGIRDKQSGKTILDFLKSDGFANRNFMQLIHDDSLTFKEDIQKAQVSGQGDSLHEHIANLAGSPAIKKGILQTVKVVDELVKVMGRHKPENIVIEMARENQTTQKGQKNSRERMKRIEEGIKELGSQILKEHPVENTQLQNEKLYLYYLQNGRDMYVDQELDINRLSDYDVDHIVPQSFLKDDSIDNKVLTRSDKNRGKSDNVPSEEVVKKMKNYWRQLLNAKLITQRKFDNLTKAERGGLSELDKAGFIKRQLVETRQITKHVAQILDSRMNTKYDENDKLIREVKVITLKSKLVSDFRKDFQFYKVREINNYHHAHDAYLNAVVGTALIKKYPKLESEFVYGDYKVYDVRKMIAKSEQEIGKATAKYFFYSNIMNFFKTEITLANGEIRKRPLIETNGETGEIVWDKGRDFATVRKVLSMPQVNIVKKTEVQTGGFSKESILPKRNSDKLIARKKDWDPKKYGGFDSPTVAYSVLVVAKVEKGKSKKLKSVKELLGITIMERSSFEKNPIDFLEAKGYKEVKKDLIIKLPKYSLFELENGRKRMLASAGELQKGNELALPSKYVNFLYLASHYEKLKGSPEDNEQKQLFVEQHKHYLDEIIEQISEFSKRVILADANLDKVLSAYNKHRDKPIREQAENIIHLFTLTNLGAPAAFKYFDTTIDRKRYTSTKEVLDATLIHQSITGLYETRIDLSQLGGDSGGSTNLSDIIEKETGKQLVIQESILMLPEEVEEVIGNKPESDILVHTAYDESTDENVMLLTSDAPEYKPWALVIQDSNGENKIKMLSGGSPKKKRKV

SEQ ID NO: 338-339 - skipped (2 entries)

SEQ ID NO: 340 - RNA, 3921 nt, synthetic construct
  misc_feature 1..3921: note = Synthetic
  source 1..3921: mol_type = other RNA
gggaagctcagaataaacgctcaactttggccggatctgccaccatggacggctccggcggcggctcccccaagaagaagcggaaggtggaggacaagcggcccgccgccaccaagaaggccggccaggccaagaagaagaagggcggctccggcggcggcgccgccttcaagcccaaccccatcaactacatcctgggcctggacatcggcatcgcctccgtgggctgggccatggtggagatcgacgaggaggagaaccccatccggctgatcgacctgggcgtgcgggtgttcgagcgggccgaggtgcccaagaccggcgactccctggccatggcccggcggctggcccggtccgtgcggcggctgacccggcggcgggcccaccggctgctgcgggcccggcggctgctgaagcgggagggcgtgctgcaggccgccgacttcgacgagaacggcctgatcaagtccctgcccaacaccccctggcagctgcgggccgccgccctggaccggaagctgacccccctggagtggtccgccgtgctgctgcacctgatcaagcaccggggctacctgtcccagcggaagaacgagggcgagaccgccgacaaggagctgggcgccctgctgaagggcgtggccaacaacgcccacgccctgcagaccggcgacttccggacccccgccgagctggccctgaacaagttcgagaaggagtccggccacatccggaaccagcggggcgactactcccacaccttctcccggaaggacctgcaggccgagctgatcctgctgttcgagaagcagaaggagttcggcaacccccacgtgtccggcggcctgaaggagggcatcgagaccctgctgatgacccagcggcccgccctgtccggcgacgccgtgcagaagatgctgggccactgcaccttcgagcccgccgagcccaaggccgccaagaacacctacaccgccgagcggttcatctggctgaccaagctgaacaacctgcggatcctggagcagggctccgagcggcccctgaccgacaccgagcgggccaccctgatggacgagccctaccggaagtccaagctgacctacgcccaggcccggaagctgctgggcctggaggacaccgccttcttcaagggcctgcggtacggcaaggacaacgccgaggcctccaccctgatggagatgaaggcctaccacgccatctcccgggccctggagaaggagggcctgaaggacaagaagtcccccctgaacctgtcctccgagctgcaggacgagatcggcaccgccttctccctgttcaagaccgacgaggacatcaccggccggctgaaggaccgggtgcagcccgagatcctggaggccctgctgaagcacatctccttcgacaagttcgtgcagatctccctgaaggccctgcggcggatcgtgcccctgatggagcagggcaagcggtacgacgaggcctgcgccgagatctacggcgaccactacggcaagaagaacaccgaggagaagatctacctgccccccatccccgccgacgagatccggaaccccgtggtgctgcgggccctgtcccaggcccggaaggtgatcaacggcgtggtgcggcggtacggctcccccgcccggatccacatcgagaccgcccgggaggtgggcaagtccttcaaggaccggaaggagatcgagaagcggcaggaggagaaccggaaggaccgggagaaggccgccgccaagttccgggagtacttccccaacttcgtgggcgagcccaagtccaaggacatcctgaagctgcggctgtacgagcagcagcacggcaagtgcctgtactccggcaaggagatcaacctggtgcggctgaacgagaagggctacgtggagatcgaccacgccctgcccttctcccggacctgggacgactccttcaacaacaaggtgctggtgctgggctccgagaaccagaacaagggcaaccagaccccctacgagtacttcaacggcaaggacaactcccgggagtggcaggagttcaaggcccgggtggagacctcccggttcccccggtccaagaagcagcggatcctgctgcagaagttcgacgaggacggcttcaaggagtgcaacctgaacgacacccggtacgtgaaccggttcctgtgccagttcgtggccgaccacatcctgctgaccggcaagggcaagcggcgggtgttcgcctccaacggccagatcaccaacctgctgcggggcttctggggcctgcggaaggtgcgggccgagaacgaccggcaccacgccctggacgccgtggtggtggcctgctccaccgtggccatgcagcagaagatcacccggttcgtgcggtacaaggagatgaacgccttcgacggcaagaccatcgacaaggagaccggcaaggtgctgcaccagaagacccacttcccccagccctgggagttcttcgcccaggaggtgatgatccgggtgttcggcaagcccgacggcaagcccgagttcgaggaggccgacacccccgagaagctgcggaccctgctggccgagaagctgtcctcccggcccgaggccgtgcacgagtacgtgacccccctgttcgtgtcccgggcccccaaccggaagatgtccggcgcccacaaggacaccctgcggtccgccaagcggttcgtgaagcacaacgagaagatctccgtgaagcgggtgtggctgaccgagatcaagctggccgacctggagaacatggtgaactacaagaacggccgggagatcgagctgtacgaggccctgaaggcccggctggaggcctacggcggcaacgccaagcaggccttcgaccccaaggacaaccccttctacaagaagggcggccagctggtgaaggccgtgcgggtggagaagacccaggagtccggcgtgctgctgaacaagaagaacgcctacaccatcgccgacaacggcgacatggtgcgggtggacgtgttctgcaaggtggacaagaagggcaagaaccagtacttcatcgtgcccatctacgcctggcaggtggccgagaacatcctgcccgacatcgactgcaagggctaccggatcgacgactcctacaccttctgcttctccctgcacaagtacgacctgatcgccttccagaaggacgagaagtccaaggtggagttcgcctactacatcaactgcgactcctccaacggccggttctacctggcctggcacgacaagggctccaaggagcagcagttccggatctccacccagaacctggtgctgatccagaagtaccaggtgaacgagctgggcaaggagatccggccctgccggctgaagaagcggccccccgtgcggtagctagcaccagcctcaagaacacccgaatggagtctctaagctacataataccaacttacactttacaaaatgttgtcccccaaaatgtagccattcgtatctgctcctaataaaaagaaagtttcttcacattctctcgagaaaaaaaaaaaatggaaaaaaaaaaaacggaaaaaaaaaaaaggtaaaaaaaaaaaatataaaaaaaaaaaacataaaaaaaaaaaacgaaaaaaaaaaaacgtaaaaaaaaaaaactcaaaaaaaaaaagataaaaaaaaaaaacctaaaaaaaaaaaatgtaaaaaaaaaaaagggaaaaaaaaaaaacgcaaaaaaaaaaaacacaaaaaaaaaaaatgcaaaaaaaaaaaatcgaaaaaaaaaaaatctaaaaaaaaaaaacgaaaaaaaaaaaacccaaaaaaaaaaaagacaaaaaaaaaaaatagaaaaaaaaaaagttaaaaaaaaaaaactgaaaaaaaaaaaatttaaaaaaaaaaaatctag

SEQ ID NO: 341 - RNA, 5342 nt, synthetic construct
  misc_feature 1..5342: note = Synthetic
  source 1..5342: mol_type = other RNA
gggaagctcagaataaacgctcaactttggccggatctgccaccatggaggcctcccccgcctccggcccccggcacctgatggacccccacatcttcacctccaacttcaacaacggcatcggccggcacaagacctacctgtgctacgaggtggagcggctggacaacggcacctccgtgaagatggaccagcaccggggcttcctgcacaaccaggccaagaacctgctgtgcggcttctacggccggcacgccgagctgcggttcctggacctggtgccctccctgcagctggaccccgcccagatctaccgggtgacctggttcatctcctggtccccctgcttctcctggggctgcgccggcgaggtgcgggccttcctgcaggagaacacccacgtgcggctgcggatcttcgccgcccggatctacgactacgaccccctgtacaaggaggccctgcagatgctgcgggacgccggcgcccaggtgtccatcatgacctacgacgagttcaagcactgctgggacaccttcgtggaccaccagggctgccccttccagccctgggacggcctggacgagcactcccaggccctgtccggccggctgcgggccatcctgcagaaccagggcaacggcaccaaggactccaccaaggacatccccgagaccccctccaaggacgacaagaagtactccatcggcctggccatcggcaccaactccgtgggctgggccgtgatcaccgacgagtacaaggtgccctccaagaagttcaaggtgctgggcaacaccgaccggcactccatcaagaagaacctgatcggcgccctgctgttcgactccggcgagaccgccgaggccacccggctgaagcggaccgcccggcggcggtacacccggcggaagaaccggatctgctacctgcaggagatcttctccaacgagatggccaaggtggacgactccttcttccaccggctggaggagtccttcctggtggaggaggacaagaagcacgagcggcaccccatcttcggcaacatcgtggacgaggtggcctaccacgagaagtaccccaccatctaccacctgcggaagaagctggtggactccaccgacaaggccgacctgcggctgatctacctggccctggcccacatgatcaagttccggggccacttcctgatcgagggcgacctgaaccccgacaactccgacgtggacaagctgttcatccagctggtgcagacctacaaccagctgttcgaggagaaccccatcaacgcctccggcgtggacgccaaggccatcctgtccgcccggctgtccaagtcccggcggctggagaacctgatcgcccagctgcccggcgagaagaagaacggcctgttcggcaacctgatcgccctgtccctgggcctgacccccaacttcaagtccaacttcgacctggccgaggacgccaagctgcagctgtccaaggacacctacgacgacgacctggacaacctgctggcccagatcggcgaccagtacgccgacctgttcctggccgccaagaacctgtccgacgccatcctgctgtccgacatcctgcgggtgaacaccgagatcaccaaggcccccctgtccgcctccatgatcaagcggtacgacgagcaccaccaggacctgaccctgctgaaggccctggtgcggcagcagctgcccgagaagtacaaggagatcttcttcgaccagtccaagaacggctacgccggctacatcgacggcggcgcctcccaggaggagttctacaagttcatcaagcccatcctggagaagatggacggcaccgaggagctgctggtgaagctgaaccgggaggacctgctgcggaagcagcggaccttcgacaacggctccatcccccaccagatccacctgggcgagctgcacgccatcctgcggcggcaggaggacttctaccccttcctgaaggacaaccgggagaagatcgagaagatcctgaccttccggatcccctactacgtgggccccctggcccggggcaactcccggttcgcctggatgacccggaagtccgaggagaccatcaccccctggaacttcgaggaggtggtggacaagggcgcctccgcccagtccttcatcgagcggatgaccaacttcgacaagaacctgcccaacgagaaggtgctgcccaagcactccctgctgtacgagtacttcaccgtgtacaacgagctgaccaaggtgaagtacgtgaccgagggcatgcggaagcccgccttcctgtccggcgagcagaagaaggccatcgtggacctgctgttcaagaccaaccggaaggtgaccgtgaagcagctgaaggaggactacttcaagaagatcgagtgcttcgactccgtggagatctccggcgtggaggaccggttcaacgcctccctgggcacctaccacgacctgctgaagatcatcaaggacaaggacttcctggacaacgaggagaacgaggacatcctggaggacatcgtgctgaccctgaccctgttcgaggaccgggagatgatcgaggagcggctgaagacctacgcccacctgttcgacgacaaggtgatgaagcagctgaagcggcggcggtacaccggctggggccggctgtcccggaagctgatcaacggcatccgggacaagcagtccggcaagaccatcctggacttcctgaagtccgacggcttcgccaaccggaacttcatgcagctgatccacgacgactccctgaccttcaaggaggacatccagaaggcccaggtgtccggccagggcgactccctgcacgagcacatcgccaacctggccggctcccccgccatcaagaagggcatcctgcagaccgtgaaggtggtggacgagctggtgaaggtgatgggccggcacaagcccgagaacatcgtgatcgagatggcccgggagaaccagaccacccagaagggccagaagaactcccgggagcggatgaagcggatcgaggagggcatcaaggagctgggctcccagatcctgaaggagcaccccgtggagaacacccagctgcagaacgagaagctgtacctgtactacctgcagaacggccgggacatgtacgtggaccaggagctggacatcaaccggctgtccgactacgacgtggaccacatcgtgccccagtccttcctgaaggacgactccatcgacaacaaggtgctgacccggtccgacaagaaccggggcaagtccgacaacgtgccctccgaggaggtggtgaagaagatgaagaactactggcggcagctgctgaacgccaagctgatcacccagcggaagttcgacaacctgaccaaggccgagcggggcggcctgtccgagctggacaaggccggcttcatcaagcggcagctggtggagacccggcagatcaccaagcacgtggcccagatcctggactcccggatgaacaccaagtacgacgagaacgacaagctgatccgggaggtgaaggtgatcaccctgaagtccaagctggtgtccgacttccggaaggacttccagttctacaaggtgcgggagatcaacaactaccaccacgcccacgacgcctacctgaacgccgtggtgggcaccgccctgatcaagaagtaccccaagctggagtccgagttcgtgtacggcgactacaaggtgtacgacgtgcggaagatgatcgccaagtccgagcaggagatcggcaaggccaccgccaagtacttcttctactccaacatcatgaacttcttcaagaccgagatcaccctggccaacggcgagatccggaagcggcccctgatcgagaccaacggcgagaccggcgagatcgtgtgggacaagggccgggacttcgccaccgtgcggaaggtgctgtccatgccccaggtgaacatcgtgaagaagaccgaggtgcagaccggcggcttctccaaggagtccatcctgcccaagcggaactccgacaagctgatcgcccggaagaaggactgggaccccaagaagtacggcggcttcgactcccccaccgtggcctactccgtgctggtggtggccaaggtggagaagggcaagtccaagaagctgaagtccgtgaaggagctgctgggcatcaccatcatggagcggtcctccttcgagaagaaccccatcgacttcctggaggccaagggctacaaggaggtgaagaaggacctgatcatcaagctgcccaagtactccctgttcgagctggagaacggccggaagcggatgctggcctccgccggcgagctgcagaagggcaacgagctggccctgccctccaagtacgtgaacttcctgtacctggcctcccactacgagaagctgaagggctcccccgaggacaacgagcagaagcagctgttcgtggagcagcacaagcactacctggacgagatcatcgagcagatctccgagttctccaagcgggtgatcctggccgacgccaacctggacaaggtgctgtccgcctacaacaagcaccgggacaagcccatccgggagcaggccgagaacatcatccacctgttcaccctgaccaacctgggcgcccccgccgccttcaagtacttcgacaccaccatcgaccggaagcggtacacctccaccaaggaggtgctggacgccaccctgatccaccagtccatcaccggcctgtacgagacccggatcgacctgtcccagctgggcggcgacggcggcggctcccccaagaagaagcggaaggtgtgactagcaccagcctcaagaacacccgaatggagtctctaagctacataataccaacttacactttacaaaatgttgtcccccaaaatgtagccattcgtatctgctcctaataaaaagaaagtttcttcacattctctcgagaaaaaaaaaaaatggaaaaaaaaaaaacggaaaaaaaaaaaaggtaaaaaaaaaaaatataaaaaaaaaaaacataaaaaaaaaaaacgaaaaaaaaaaaacgtaaaaaaaaaaaactcaaaaaaaaaaaagataaaaaaaaaaaacctaaaaaaaaaaaatgtaaaaaaaaaaaagggaaaaaaaaaaaacgcaaaaaaaaaaaacacaaaaaaaaaaaatgcaaaaaaaaaaaatcgaaaaaaaaaaaatctaaaaaaaaaaaacgaaaaaaaaaaaacccaaaaaaaaaaaagacaaaaaaaaaaaatagaaaaaaaaaaaagttaaaaaaaaaaaactgaaaaaaaaaaaatttaaaaaaaaaaaatctag

SEQ ID NO: 342 - RNA, 5342 nt, synthetic construct
  misc_feature 1..5342: note = Synthetic
  source 1..5342: mol_type = other RNA
gggaagctcagaataaacgctcaactttggccggatctgccaccatggaggcctcccccgcctccggcccccggcacctgatggacccccacatcttcacctccaacttcaacaacggcatcggccggcacaagacctacctgtgctacgaggtggagcggctggacaacggcacctccgtgaagatggaccagcaccggggcttcctgcacaaccaggccaagaacctgctgtgcggcttctacggccggcacgccgagctgcggttcctggacctggtgccctccctgcagctggaccccgcccagatctaccgggtgacctggttcatctcctggtccccctgcttctcctggggctgcgccggcgaggtgcgggccttcctgcaggagaacacccacgtgcggctgcggatcttcgccgcccggatctacgactacgaccccctgtacaaggaggccctgcagatgctgcgggacgccggcgcccaggtgtccatcatgacctacgacgagttcaagcactgctgggacaccttcgtggaccaccagggctgccccttccagccctgggacggcctggacgagcactcccaggccctgtccggccggctgcgggccatcctgcagaaccagggcaacggccgggacgtgcggcagcccgaggtgaaggaggagaagcccgagtccgacaagaagtactccatcggcctggccatcggcaccaactccgtgggctgggccgtgatcaccgacgagtacaaggtgccctccaagaagttcaaggtgctgggcaacaccgaccggcactccatcaagaagaacctgatcggcgccctgctgttcgactccggcgagaccgccgaggccacccggctgaagcggaccgcccggcggcggtacacccggcggaagaaccggatctgctacctgcaggagatcttctccaacgagatggccaaggtggacgactccttcttccaccggctggaggagtccttcctggtggaggaggacaagaagcacgagcggcaccccatcttcggcaacatcgtggacgaggtggcctaccacgagaagtaccccaccatctaccacctgcggaagaagctggtggactccaccgacaaggccgacctgcggctgatctacctggccctggcccacatgatcaagttccggggccacttcctgatcgagggcgacctgaaccccgacaactccgacgtggacaagctgttcatccagctggtgcagacctacaaccagctgttcgaggagaaccccatcaacgcctccggcgtggacgccaaggccatcctgtccgcccggctgtccaagtcccggcggctggagaacctgatcgcccagctgcccggcgagaagaagaacggcctgttcggcaacctgatcgccctgtccctgggcctgacccccaacttcaagtccaacttcgacctggccgaggacgccaagctgcagctgtccaaggacacctacgacgacgacctggacaacctgctggcccagatcggcgaccagtacgccgacctgttcctggccgccaagaacctgtccgacgccatcctgctgtccgacatcctgcgggtgaacaccgagatcaccaaggcccccctgtccgcctccatgatcaagcggtacgacgagcaccaccaggacctgaccctgctgaaggccctggtgcggcagcagctgcccgagaagtacaaggagatcttcttcgaccagtccaagaacggctacgccggctacatcgacggcggcgcctcccaggaggagttctacaagttcatcaagcccatcctggagaagatggacggcaccgaggagctgctggtgaagctgaaccgggaggacctgctgcggaagcagcggaccttcgacaacggctccatcccccaccagatccacctgggcgagctgcacgccatcctgcggcggcaggaggacttctaccccttcctgaaggacaaccgggagaagatcgagaagatcctgaccttccggatcccctactacgtgggccccctggcccggggcaactcccggttcgcctggatgacccggaagtccgaggagaccatcaccccctggaacttcgaggaggtggtggacaagggcgcctccgcccagtccttcatcgagcggatgaccaacttcgacaagaacctgcccaacgagaaggtgctgcccaagcactccctgctgtacgagtacttcaccgtgtacaacgagctgaccaaggtgaagtacgtgaccgagggcatgcggaagcccgccttcctgtccggcgagcagaagaaggccatcgtggacctgctgttcaagaccaaccggaaggtgaccgtgaagcagctgaaggaggactacttcaagaagatcgagtgcttcgactccgtggagatctccggcgtggaggaccggttcaacgcctccctgggcacctaccacgacctgctgaagatcatcaaggacaaggacttcctggacaacgaggagaacgaggacatcctggaggacatcgtgctgaccctgaccctgttcgaggaccgggagatgatcgaggagcggctgaagacctacgcccacctgttcgacgacaaggtgatgaagcagctgaagcggcggcggtacaccggctggggccggctgtcccggaagctgatcaacggcatccgggacaagcagtccggcaagaccatcctggacttcctgaagtccgacggcttcgccaaccggaacttcatgcagctgatccacgacgactccctgaccttcaaggaggacatccagaaggcccaggtgtccggccagggcgactccctgcacgagcacatcgccaacctggccggctcccccgccatcaagaagggcatcctgcagaccgtgaaggtggtggacgagctggtgaaggtgatgggccggcacaagcccgagaacatcgtgatcgagatggcccgggagaaccagaccacccagaagggccagaagaactcccgggagcggatgaagcggatcgaggagggcatcaaggagctgggctcccagatcctgaaggagcaccccgtggagaacacccagctgcagaacgagaagctgtacctgtactacctgcagaacggccgggacatgtacgtggaccaggagctggacatcaaccggctgtccgactacgacgtggaccacatcgtgccccagtccttcctgaaggacgactccatcgacaacaaggtgctgacccggtccgacaagaaccggggcaagtccgacaacgtgccctccgaggaggtggtgaagaagatgaagaactactggcggcagctgctgaacgccaagctgatcacccagcggaagttcgacaacctgaccaaggccgagcggggcggcctgtccgagctggacaaggccggcttcatcaagcggcagctggtggagacccggcagatcaccaagcacgtggcccagatcctggactcccggatgaacaccaagtacgacgagaacgacaagctgatccgggaggtgaaggtgatcaccctgaagtccaagctggtgtccgacttccggaaggacttccagttctacaaggtgcgggagatcaacaactaccaccacgcccacgacgcctacctgaacgccgtggtgggcaccgccctgatcaagaagtaccccaagctggagtccgagttcgtgtacggcgactacaaggtgtacgacgtgcggaagatgatcgccaagtccgagcaggagatcggcaaggccaccgccaagtacttcttctactccaacatcatgaacttcttcaagaccgagatcaccctggccaacggcgagatccggaagcggcccctgatcgagaccaacggcgagaccggcgagatcgtgtgggacaagggccgggacttcgccaccgtgcggaaggtgctgtccatgccccaggtgaacatcgtgaagaagaccgaggtgcagaccggcggcttctccaaggagtccatcctgcccaagcggaactccgacaagctgatcgcccggaagaaggactgggaccccaagaagtacggcggcttcgactcccccaccgtggcctactccgtgctggtggtggccaaggtggagaagggcaagtccaagaagctgaagtccgtgaaggagctgctgggcatcaccatcatggagcggtcctccttcgagaagaaccccatcgacttcctggaggccaagggctacaaggaggtgaagaaggacctgatcatcaagctgcccaagtactccctgttcgagctggagaacggccggaagcggatgctggcctccgccggcgagctgcagaagggcaacgagctggccctgccctccaagtacgtgaacttcctgtacctggcctcccactacgagaagctgaagggctcccccgaggacaacgagcagaagcagctgttcgtggagcagcacaagcactacctggacgagatcatcgagcagatctccgagttctccaagcgggtgatcctggccgacgccaacctggacaaggtgctgtccgcctacaacaagcaccgggacaagcccatccgggagcaggccgagaacatcatccacctgttcaccctgaccaacctgggcgcccccgccgccttcaagtacttcgacaccaccatcgaccggaagcggtacacctccaccaaggaggtgctggacgccaccctgatccaccagtccatcaccggcctgtacgagacccggatcgacctgtcccagctgggcggcgacggcggcggctcccccaagaagaagcggaaggtgtgactagcaccagcctcaagaacacccgaatggagtctctaagctacataataccaacttacactttacaaaatgttgtcccccaaaatgtagccattcgtatctgctcctaataaaaagaaagtttcttcacattctctcgagaaaaaaaaaaaatggaaaaaaaaaaaacggaaaaaaaaaaaaggtaaaaaaaaaaaatataaaaaaaaaaaacataaaaaaaaaaaacgaaaaaaaaaaaacgtaaaaaaaaaaaactcaaaaaaaaaaaagataaaaaaaaaaaacctaaaaaaaaaaaatgtaaaaaaaaaaaagggaaaaaaaaaaaacgcaaaaaaaaaaaacacaaaaaaaaaaaatgcaaaaaaaaaaaatcgaaaaaaaaaaaatctaaaaaaaaaaaacgaaaaaaaaaaaacccaaaaaaaaaaaagacaaaaaaaaaaaatagaaaaaaaaaaaagttaaaaaaaaaaaactgaaaaaaaaaaaatttaaaaaaaaaaaatctag

SEQ ID NO: 343 - RNA, 5342 nt, synthetic construct
  misc_feature 1..5342: note = Synthetic
  source 1..5342: mol_type = other RNA
gggaagctcagaataaacgctcaactttggccggatctgccaccatggaggcctcccccgcctccggcccccggcacctgatggacccccacatcttcacctccaacttcaacaacggcatcggccggcacaagacctacctgtgctacgaggtggagcggctggacaacggcacctccgtgaagatggaccagcaccggggcttcctgcacaaccaggccaagaacctgctgtgcggcttctacggccggcacgccgagctgcggttcctggacctggtgccctccctgcagctggaccccgcccagatctaccgggtgacctggttcatctcctggtccccctgcttctcctggggctgcgccggcgaggtgcgggccttcctgcaggagaacacccacgtgcggctgcggatcttcgccgcccggatctacgactacgaccccctgtacaaggaggccctgcagatgctgcgggacgccggcgcccaggtgtccatcatgacctacgacgagttcaagcactgctgggacaccttcgtggaccaccagggctgccccttccagccctgggacggcctggacgagcactcccaggccctgtccggccggctgcgggccatcctgcagaaccagggcaacgagggcaagtcctccggctccggctccgagtccaagtccaccgccggcgacaagaagtactccatcggcctggccatcggcaccaactccgtgggctgggccgtgatcaccgacgagtacaaggtgccctccaagaagttcaaggtgctgggcaacaccgaccggcactccatcaagaagaacctgatcggcgccctgctgttcgactccggcgagaccgccgaggccacccggctgaagcggaccgcccggcggcggtacacccggcggaagaaccggatctgctacctgcaggagatcttctccaacgagatggccaaggtggacgactccttcttccaccggctggaggagtccttcctggtggaggaggacaagaagcacgagcggcaccccatcttcggcaacatcgtggacgaggtggcctaccacgagaagtaccccaccatctaccacctgcggaagaagctggtggactccaccgacaaggccgacctgcggctgatctacctggccctggcccacatgatcaagttccggggccacttcctgatcgagggcgacctgaaccccgacaactccgacgtggacaagctgttcatccagctggtgcagacctacaaccagctgttcgaggagaaccccatcaacgcctccggcgtggacgccaaggccatcctgtccgcccggctgtccaagtcccggcggctggagaacctgatcgcccagctgcccggcgagaagaagaacggcctgttcggcaacctgatcgccctgtccctgggcctgacccccaacttcaagtccaacttcgacctggccgaggacgccaagctgcagctgtccaaggacacctacgacgacgacctggacaacctgctggcccagatcggcgaccagtacgccgacctgttcctggccgccaagaacctgtccgacgccatcctgctgtccgacatcctgcgggtgaacaccgagatcaccaaggcccccctgtccgcctccatgatcaagcggtacgacgagcaccaccaggacctgaccctgctgaaggccctggtgcggcagcagctgcccgagaagtacaaggagatcttcttcgaccagtccaagaacggctacgccggctacatcgacggcggcgcctcccaggaggagttctacaagttcatcaagcccatcctggagaagatggacggcaccgaggagctgctggtgaagctgaaccgggaggacctgctgcggaagcagcggaccttcgacaacggctccatcccccaccagatccacctgggcgagctgcacgccatcctgcggcggcaggaggacttctaccccttcctgaaggacaaccgggagaagatcgagaagatcctgaccttccggatcccctactacgtgggccccctggcccggggcaactcccggttcgcctggatgacccggaagtccgaggagaccatcaccccctggaacttcgaggaggtggtggacaagggcgcctccgcccagtccttcatcgagcggatgaccaacttcgacaagaacctgcccaacgagaaggtgctgcccaagcactccctgctgtacgagtacttcaccgtgtacaacgagctgaccaaggtgaagtacgtgaccgagggcatgcggaagcccgccttcctgtccggcgagcagaagaaggccatcgtggacctgctgttcaagaccaaccggaaggtgaccgtgaagcagctgaaggaggactacttcaagaagatcgagtgcttcgactccgtggagatctccggcgtggaggaccggttcaacgcctccctgggcacctaccacgacctgctgaagatcatcaaggacaaggacttcctggacaacgaggagaacgaggacatcctggaggacatcgtgctgaccctgaccctgttcgaggaccgggagatgatcgaggagcggctgaagacctacgcccacctgttcgacgacaaggtgatgaagcagctgaagcggcggcggtacaccggctggggccggctgtcccggaagctgatcaacggcatccgggacaagcagtccggcaagaccatcctggacttcctgaagtccgacggcttcgccaaccggaacttcatgcagctgatccacgacgactccctgaccttcaaggaggacatccagaaggcccaggtgtccggccagggcgactccctgcacgagcacatcgccaacctggccggctcccccgccatcaagaagggcatcctgcagaccgtgaaggtggtggacgagctggtgaaggtgatgggccggcacaagcccgagaacatcgtgatcgagatggcccgggagaaccagaccacccagaagggccagaagaactcccgggagcggatgaagcggatcgaggagggcatcaaggagctgggctcccagatcctgaaggagcaccccgtggagaacacccagctgcagaacgagaagctgtacctgtactacctgcagaacggccgggacatgtacgtggaccaggagctggacatcaaccggctgtccgactacgacgtggaccacatcgtgccccagtccttcctgaaggacgactccatcgacaacaaggtgctgacccggtccgacaagaaccggggcaagtccgacaacgtgccctccgaggaggtggtgaagaagatgaagaactactggcggcagctgctgaacgccaagctgatcacccagcggaagttcgacaacctgaccaaggccgagcggggcggcctgtccgagctggacaaggccggcttcatcaagcggcagctggtggagacccggcagatcaccaagcacgtggcccagatcctggactcccggatgaacaccaagtacgacgagaacgacaagctgatccgggaggtgaaggtgatcaccctgaagtccaagctggtgtccgacttccggaaggacttccagttctacaaggtgcgggagatcaacaactaccaccacgcccacgacgcctacctgaacgccgtggtgggcaccgccctgatcaagaagtaccccaagctggagtccgagttcgtgtacggcgactacaaggtgtacgacgtgcggaagatgatcgccaagtccgagcaggagatcggcaaggccaccgccaagtacttcttctactccaacatcatgaacttcttcaagaccgagatcaccctggccaacggcgagatccggaagcggcccctgatcgagaccaacggcgagaccggcgagatcgtgtgggacaagggccgggacttcgccaccgtgcggaaggtgctgtccatgccccaggtgaacatcgtgaagaagaccgaggtgcagaccggcggcttctccaaggagtccatcctgcccaagcggaactccgacaagctgatcgcccggaagaaggactgggaccccaagaagtacggcggcttcgactcccccaccgtggcctactccgtgctggtggtggccaaggtggagaagggcaagtccaagaagctgaagtccgtgaaggagctgctgggcatcaccatcatggagcggtcctccttcgagaagaaccccatcgacttcctggaggccaagggctacaaggaggtgaagaaggacctgatcatcaagctgcccaagtactccctgttcgagctggagaacggccggaagcggatgctggcctccgccggcgagctgcagaagggcaacgagctggccctgccctccaagtacgtgaacttcctgtacctggcctcccactacgagaagctgaagggctcccccgaggacaacgagcagaagcagctgttcgtggagcagcacaagcactacctggacgagatcatcgagcagatctccgagttctccaagcgggtgatcctggccgacgccaacctggacaaggtgctgtccgcctacaacaagcaccgggacaagcccatccgggagcaggccgagaacatcatccacctgttcaccctgaccaacctgggcgcccccgccgccttcaagtacttcgacaccaccatcgaccggaagcggtacacctccaccaaggaggtgctggacgccaccctgatccaccagtccatcaccggcctgtacgagacccggatcgacctgtcccagctgggcggcgacggcggcggctcccccaagaagaagcggaaggtgtgactagcaccagcctcaagaacacccgaatggagtctctaagctacataataccaacttacactttacaaaatgttgtcccccaaaatgtagccattcgtatctgctcctaataaaaagaaagtttcttcacattctctcgagaaaaaaaaaaaatggaaaaaaaaaaaacggaaaaaaaaaaaaggtaaaaaaaaaaaatataaaaaaaaaaaacataaaaaaaaaaaacgaaaaaaaaaaaacgtaaaaaaaaaaaactcaaaaaaaaaaaagataaaaaaaaaaaacctaaaaaaaaaaaatgtaaaaaaaaaaaagggaaaaaaaaaaaacgcaaaaaaaaaaaacacaaaaaaaaaaaatgcaaaaaaaaaaaatcgaaaaaaaaaaaatctaaaaaaaaaaaacgaaaaaaaaaaaacccaaaaaaaaaaaagacaaaaaaaaaaaatagaaaaaaaaaaaagttaaaaaaaaaaaactgaaaaaaaaaaaatttaaaaaaaaaaaatctag

SEQ ID NO: 344 - RNA, 5342 nt, synthetic construct
  misc_feature 1..5342: note = Synthetic
  source 1..5342: mol_type = other RNA
gggaagctcagaataaacgctcaactttggccggatctgccaccatggaggcctcccccgcctccggcccccggcacctgatggacccccacatcttcacctccaacttcaacaacggcatcggccggcacaagacctacctgtgctacgaggtggagcggctggacaacggcacctccgtgaagatggaccagcaccggggcttcctgcacaaccaggccaagaacctgctgtgcggcttctacggccggcacgccgagctgcggttcctggacctggtgccctccctgcagctggaccccgcccagatctaccgggtgacctggttcatctcctggtccccctgcttctcctggggctgcgccggcgaggtgcgggccttcctgcaggagaacacccacgtgcggctgcggatcttcgccgcccggatctacgactacgaccccctgtacaaggaggccctgcagatgctgcgggacgccggcgcccaggtgtccatcatgacctacgacgagttcaagcactgctgggacaccttcgtggaccaccagggctgccccttccagccctgggacggcctggacgagcactcccaggccctgtccggccggctgcgggccatcctgcagaaccagggcaacacccccggctcccccgccggctcccccacctccaccgaggagggcaccgacaagaagtactccatcggcctggccatcggcaccaactccgtgggctgggccgtgatcaccgacgagtacaaggtgccctccaagaagttcaaggtgctgggcaacaccgaccggcactccatcaagaagaacctgatcggcgccctgctgttcgactccggcgagaccgccgaggccacccggctgaagcggaccgcccggcggcggtacacccggcggaagaaccggatctgctacctgcaggagatcttctccaacgagatggccaaggtggacgactccttcttccaccggctggaggagtccttcctggtggaggaggacaagaagcacgagcggcaccccatcttcggcaacatcgtggacgaggtggcctaccacgagaagtaccccaccatctaccacctgcggaagaagctggtggactccaccgacaaggccgacctgcggctgatctacctggccctggcccacatgatcaagttccggggccacttcctgatcgagggcgacctgaaccccgacaactccgacgtggacaagctgttcatccagctggtgcagacctacaaccagctgttcgaggagaaccccatcaacgcctccggcgtggacgccaaggccatcctgtccgcccggctgtccaagtcccggcggctggagaacctgatcgcccagctgcccggcgagaagaagaacggcctgttcggcaacctgatcgccctgtccctgggcctgacccccaacttcaagtccaacttcgacctggccgaggacgccaagctgcagctgtccaaggacacctacgacgacgacctggacaacctgctggcccagatcggcgaccagtacgccgacctgttcctggccgccaagaacctgtccgacgccatcctgctgtccgacatcctgcgggtgaacaccgagatcaccaaggcccccctgtccgcctccatgatcaagcggtacgacgagcaccaccaggacctgaccctgctgaaggccctggtgcggcagcagctgcccgagaagtacaaggagatcttcttcgaccagtccaagaacggctacgccggctacatcgacggcggcgcctcccaggaggagttctacaagttcatcaagcccatcctggagaagatggacggcaccgaggagctgctggtgaagctgaaccgggaggacctgctgcggaagcagcggaccttcgacaacggctccatcccccaccagatccacctgggcgagctgcacgccatcctgcggcggcaggaggacttctaccccttcctgaaggacaaccgggagaagatcgagaagatcctgaccttccggatcccctactacgtgggccccctggcccggggcaactcccggttcgcctggatgacccggaagtccgaggagaccatcaccccctggaacttcgaggaggtggtggacaagggcgcctccgcccagtccttcatcgagcggatgaccaacttcgacaagaacctgcccaacgagaaggtgctgcccaagcactccctgctgtacgagtacttcaccgtgtacaacgagctgaccaaggtgaagtacgtgaccgagggcatgcggaagcccgccttcctgtccggcgagcagaagaaggccatcgtggacctgctgttcaagaccaaccggaaggtgaccgtgaagcagctgaaggaggactacttcaagaagatcgagtgcttcgactccgtggagatctccggcgtggaggaccggttcaacgcctccctgggcacctaccacgacctgctgaagatcatcaaggacaaggacttcctggacaacgaggagaacgaggacatcctggaggacatcgtgctgaccctgaccctgttcgaggaccgggagatgatcgaggagcggctgaagacctacgcccacctgttcgacgacaaggtgatgaagcagctgaagcggcggcggtacaccggctggggccggctgtcccggaagctgatcaacggcatccgggacaagcagtccggcaagaccatcctggacttcctgaagtccgacggcttcgccaaccggaacttcatgcagctgatccacgacgactccctgaccttcaaggaggacatccagaaggcccaggtgtccggccagggcgactccctgcacgagcacatcgccaacctggccggctcccccgccatcaagaagggcatcctgcagaccgtgaaggtggtggacgagctggtgaaggtgatgggccggcacaagcccgagaacatcgtgatcgagatggcccgggagaaccagaccacccagaagggccagaagaactcccgggagcggatgaagcggatcgaggagggcatcaaggagctgggctcccagatcctgaaggagcaccccgtggagaacacccagctgcagaacgagaagctgtacctgtactacctgcagaacggccgggacatgtacgtggaccaggagctggacatcaaccggctgtccgactacgacgtggaccacatcgtgccccagtccttcctgaaggacgactccatcgacaacaaggtgctgacccggtccgacaagaaccggggcaagtccgacaacgtgccctccgaggaggtggtgaagaagatgaagaactactggcggcagctgctgaacgccaagctgatcacccagcggaagttcgacaacctgaccaaggccgagcggggcggcctgtccgagctggacaaggccggcttcatcaagcggcagctggtggagacccggcagatcaccaagcacgtggcccagatcctggactcccggatgaacaccaagtacgacgagaacgacaagctgatccgggaggtgaaggtgatcaccctgaagtccaagctggtgtccgacttccggaaggacttccagttctacaaggtgcgggagatcaacaactaccaccacgcccacgacgcctacctgaacgccgtggtgggcaccgccctgatcaagaagtaccccaagctggagtccgagttcgtgtacggcgactacaaggtgtacgacgtgcggaagatgatcgccaagtccgagcaggagatcggcaaggccaccgccaagtacttcttctactccaacatcatgaacttcttcaagaccgagatcaccctggccaacggcgagatccggaagcggcccctgatcgagaccaacggcgagaccggcgagatcgtgtgggacaagggccgggacttcgccaccgtgcggaaggtgctgtccatgccccaggtgaacatcgtgaagaagaccgaggtgcagaccggcggcttctccaaggagtccatcctgcccaagcggaactccgacaagctgatcgcccggaagaaggactgggaccccaagaagtacggcggcttcgactcccccaccgtggcctactccgtgctggtggtggccaaggtggagaagggcaagtccaagaagctgaagtccgtgaaggagctgctgggcatcaccatcatggagcggtcctccttcgagaagaaccccatcgacttcctggaggccaagggctacaaggaggtgaagaaggacctgatcatcaagctgcccaagtactccctgttcgagctggagaacggccggaagcggatgctggcctccgccggcgagctgcagaagggcaacgagctggccctgccctccaagtacgtgaacttcctgtacctggcctcccactacgagaagctgaagggctcccccgaggacaacgagcagaagcagctgttcgtggagcagcacaagcactacctggacgagatcatcgagcagatctccgagttctccaagcgggtgatcctggccgacgccaacctggacaaggtgctgtccgcctacaacaagcaccgggacaagcccatccgggagcaggccgagaacatcatccacctgttcaccctgaccaacctgggcgcccccgccgccttcaagtacttcgacaccaccatcgaccggaagcggtacacctccaccaaggaggtgctggacgccaccctgatccaccagtccatcaccggcctgtacgagacccggatcgacctgtcccagctgggcggcgacggcggcggctcccccaagaagaagcggaaggtgtgactagcaccagcctcaagaacacccgaatggagtctctaagctacataataccaacttacactttacaaaatgttgtcccccaaaatgtagccattcgtatctgctcctaataaaaagaaagtttcttcacattctctcgagaaaaaaaaaaaatggaaaaaaaaaaaacggaaaaaaaaaaaaggtaaaaaaaaaaaatataaaaaaaaaaaacataaaaaaaaaaaacgaaaaaaaaaaaacgtaaaaaaaaaaaactcaaaaaaaaaaaagataaaaaaaaaaaacctaaaaaaaaaaaatgtaaaaaaaaaaaagggaaaaaaaaaaaacgcaaaaaaaaaaaacacaaaaaaaaaaaatgcaaaaaaaaaaaatcgaaaaaaaaaaaatctaaaaaaaaaaaacgaaaaaaaaaaaacccaaaaaaaaaaaagacaaaaaaaaaaaatagaaaaaaaaaaaagttaaaaaaaaaaaactgaaaaaaaaaaaatttaaaaaaaaaaaatctag

SEQ ID NO: 345 - RNA, 5342 nt, synthetic construct
  misc_feature 1..5342: note = Synthetic
  source 1..5342: mol_type = other RNA
gggaagctcagaataaacgctcaactttggccggatctgccaccatggaggcctcccccgcctccggcccccggcacctgatggacccccacatcttcacctccaacttcaacaacggcatcggccggcacaagacctacctgtgctacgaggtggagcggctggacaacggcacctccgtgaagatggaccagcaccggggcttcctgcacaaccaggccaagaacctgctgtgcggcttctacggccggcacgccgagctgcggttcctggacctggtgccctccctgcagctggaccccgcccagatctaccgggtgacctggttcatctcctggtccccctgcttctcctggggctgcgccggcgaggtgcgggccttcctgcaggagaacacccacgtgcggctgcggatcttcgccgcccggatctacgactacgaccccctgtacaaggaggccctgcagatgctgcgggacgccggcgcccaggtgtccatcatgacctacgacgagttcaagcactgctgggacaccttcgtggaccaccagggctgccccttccagccctgggacggcctggacgagcactcccaggccctgtccggccggctgcgggccatcctgcagaaccagggcaacggctccgagcccgccacctccggctccgagacccccggcacctccaccgacaagaagtactccatcggcctggccatcggcaccaactccgtgggctgggccgtgatcaccgacgagtacaaggtgccctccaagaagttcaaggtgctgggcaacaccgaccggcactccatcaagaagaacctgatcggcgccctgctgttcgactccggcgagaccgccgaggccacccggctgaagcggaccgcccggcggcggtacacccggcggaagaaccggatctgctacctgcaggagatcttctccaacgagatggccaaggtggacgactccttcttccaccggctggaggagtccttcctggtggaggaggacaagaagcacgagcggcaccccatcttcggcaacatcgtggacgaggtggcctaccacgagaagtaccccaccatctaccacctgcggaagaagctggtggactccaccgacaaggccgacctgcggctgatctacctggccctggcccacatgatcaagttccggggccacttcctgatcgagggcgacctgaaccccgacaactccgacgtggacaagctgttcatccagctggtgcagacctacaaccagctgttcgaggagaaccccatcaacgcctccggcgtggacgccaaggccatcctgtccgcccggctgtccaagtcccggcggctggagaacctgatcgcccagctgcccggcgagaagaagaacggcctgttcggcaacctgatcgccctgtccctgggcctgacccccaacttcaagtccaacttcgacctggccgaggacgccaagctgcagctgtccaaggacacctacgacgacgacctggacaacctgctggcccagatcggcgaccagtacgccgacctgttcctggccgccaagaacctgtccgacgccatcctgctgtccgacatcctgcgggtgaacaccgagatcaccaaggcccccctgtccgcctccatgatcaagcggtacgacgagcaccaccaggacctgaccctgctgaaggccctggtgcggcagcagctgcccgagaagtacaaggagatcttcttcgaccagtccaagaacggctacgccggctacatcgacggcggcgcctcccaggaggagttctacaagttcatcaagcccatcctggagaagatggacggcaccgaggagctgctggtgaagctgaaccgggaggacctgctgcggaagcagcggaccttcgacaacggctccatcccccaccagatccacctgggcgagctgcacgccatcctgcggcggcaggaggacttctaccccttcctgaaggacaaccgggagaagatcgagaagatcctgaccttccggatcccctactacgtgggccccctggcccggggcaactcccggttcgcctggatgacccggaagtccgaggagaccatcaccccctggaacttcgaggaggtggtggacaagggcgcctccgcccagtccttcatcgagcggatgaccaacttcgacaagaacctgcccaacgagaaggtgctgcccaagcactccctgctgtacgagtacttcaccgtgtacaacgagctgaccaaggtgaagtacgtgaccgagggcatgcggaagcccgccttcctgtccggcgagcagaagaaggccatcgtggacctgctgttcaagaccaaccggaaggtgaccgtgaagcagctgaaggaggactacttcaagaagatcgagtgcttcgactccgtggagatctccggcgtggaggaccggttcaacgcctccctgggcacctaccacgacctgctgaagatcatcaaggacaaggacttcctggacaacgaggagaacgaggacatcctggaggacatcgtgctgaccctgaccctgttcgaggaccgggagatgatcgaggagcggctgaagacctacgcccacctgttcgacgacaaggtgatgaagcagctgaagcggcggcggtacaccggctggggccggctgtcccggaagctgatcaacggcatccgggacaagcagtccggcaagaccatcctggacttcctgaagtccgacggcttcgccaaccggaacttcatgcagctgatccacgacgactccctgaccttcaaggaggacatccagaaggcccaggtgtccggccagggcgactccctgcacgagcacatcgccaacctggccggctcccccgccatcaagaagggcatcctgcagaccgtgaaggtggtggacgagctggtgaaggtgatgggccggcacaagcccgagaacatcgtgatcgagatggcccgggagaaccagaccacccagaagggccagaagaactcccgggagcggatgaagcggatcgaggagggcatcaaggagctgggctcccagatcctgaaggagcaccccgtggagaacacccagctgcagaacgagaagctgtacctgtactacctgcagaacggccgggacatgtacgtggaccaggagctggacatcaaccggctgtccgactacgacgtggaccacatcgtgccccagtccttcctgaaggacgactccatcgacaacaaggtgctgacccggtccgacaagaaccggggcaagtccgacaacgtgccctccgaggaggtggtgaagaagatgaagaactactggcggcagctgctgaacgccaagctgatcacccagcggaagttcgacaacctgaccaaggccgagcggggcggcctgtccgagctggacaaggccggcttcatcaagcggcagctggtggagacccggcagatcaccaagcacgtggcccagatcctggactcccggatgaacaccaagtacgacgagaacgacaagctgatccgggaggtgaaggtgatcaccctgaagtccaagctggtgtccgacttccggaaggacttccagttctacaaggtgcgggagatcaacaactaccaccacgcccacgacgcctacctgaacgccgtggtgggcaccgccctgatcaagaagtaccccaagctggagtccgagttcgtgtacggcgactacaaggtgtacgacgtgcggaagatgatcgccaagtccgagcaggagatcggcaaggccaccgccaagtacttcttctactccaacatcatgaacttcttcaagaccgagatcaccctggccaacggcgagatccggaagcggcccctgatcgagaccaacggcgagaccggcgagatcgtgtgggacaagggccgggacttcgccaccgtgcggaaggtgctgtccatgccccaggtgaacatcgtgaagaagaccgaggtgcagaccggcggcttctccaaggagtccatcctgcccaagcggaactccgacaagctgatcgcccggaagaaggactgggaccccaagaagtacggcggcttcgactcccccaccgtggcctactccgtgctggtggtggccaaggtggagaagggcaagtccaagaagctgaagtccgtgaaggagctgctgggcatcaccatcatggagcggtcctccttcgagaagaaccccatcgacttcctggaggccaagggctacaaggaggtgaagaaggacctgatcatcaagctgcccaagtactccctgttcgagctggagaacggccggaagcggatgctggcctccgccggcgagctgcagaagggcaacgagctggccctgccctccaagtacgtgaacttcctgtacctggcctcccactacgagaagctgaagggctcccccgaggacaacgagcagaagcagctgttcgtggagcagcacaagcactacctggacgagatcatcgagcagatctccgagttctccaagcgggtgatcctggccgacgccaacctggacaaggtgctgtccgcctacaacaagcaccgggacaagcccatccgggagcaggccgagaacatcatccacctgttcaccctgaccaacctgggcgcccccgccgccttcaagtacttcgacaccaccatcgaccggaagcggtacacctccaccaaggaggtgctggacgccaccctgatccaccagtccatcaccggcctgtacgagacccggatcgacctgtcccagctgggcggcgacggcggcggctcccccaagaagaagcggaaggtgtgactagcaccagcctcaagaacacccgaatggagtctctaagctacataataccaacttacactttacaaaatgttgtcccccaaaatgtagccattcgtatctgctcctaataaaaagaaagtttcttcacattctctcgagaaaaaaaaaaaatggaaaaaaaaaaaacggaaaaaaaaaaaaggtaaaaaaaaaaaatataaaaaaaaaaaacataaaaaaaaaaaacgaaaaaaaaaaaacgtaaaaaaaaaaaactcaaaaaaaaaaaagataaaaaaaaaaaacctaaaaaaaaaaaatgtaaaaaaaaaaaagggaaaaaaaaaaaacgcaaaaaaaaaaaacacaaaaaaaaaaaatgcaaaaaaaaaaaatcgaaaaaaaaaaaatctaaaaaaaaaaaacgaaaaaaaaaaaacccaaaaaaaaaaaagacaaaaaaaaaaaatagaaaaaaaaaaaagttaaaaaaaaaaaactgaaaaaaaaaaaatttaaaaaaaaaaaatctag

SEQ ID NO: 346 - RNA, 5339 nt, synthetic construct
  misc_feature 1..5339: note = Synthetic
  source 1..5339: mol_type = other RNA
gggaagctcagaataaacgctcaactttggccggatctgccaccatggaggcctcccccgcctccggcccccggcacctgatggacccccacatcttcacctccaacttcaacaacggcatcggccggcacaagacctacctgtgctacgaggtggagcggctggacaacggcacctccgtgaagatggaccagcaccggggcttcctgcacaaccaggccaagaacctgctgtgcggcttctacggccggcacgccgagctgcggttcctggacctggtgccctccctgcagctggaccccgcccagatctaccgggtgacctggttcatctcctggtccccctgcttctcctggggctgcgccggcgaggtgcgggccttcctgcaggagaacacccacgtgcggctgcggatcttcgccgcccggatctacgactacgaccccctgtacaaggaggccctgcagatgctgcgggacgccggcgcccaggtgtccatcatgacctacgacgagttcaagcactgctgggacaccttcgtggaccaccagggctgccccttccagccctgggacggcctggacgagcactcccaggccctgtccggccggctgcgggccatcctgcagaaccagggcaacgaggccgccgccaaggaggccgccgccaaggaggccgccgccaaggacaagaagtactccatcggcctggccatcggcaccaactccgtgggctgggccgtgatcaccgacgagtacaaggtgccctccaagaagttcaaggtgctgggcaacaccgaccggcactccatcaagaagaacctgatcggcgccctgctgttcgactccggcgagaccgccgaggccacccggctgaagcggaccgcccggcggcggtacacccggcggaagaaccggatctgctacctgcaggagatcttctccaacgagatggccaaggtggacgactccttcttccaccggctggaggagtccttcctggtggaggaggacaagaagcacgagcggcaccccatcttcggcaacatcgtggacgaggtggcctaccacgagaagtaccccaccatctaccacctgcggaagaagctggtggactccaccgacaaggccgacctgcggctgatctacctggccctggcccacatgatcaagttccggggccacttcctgatcgagggcgacctgaaccccgacaactccgacgtggacaagctgttcatccagctggtgcagacctacaaccagctgttcgaggagaaccccatcaacgcctccggcgtggacgccaaggccatcctgtccgcccggctgtccaagtcccggcggctggagaacctgatcgcccagctgcccggcgagaagaagaacggcctgttcggcaacctgatcgccctgtccctgggcctgacccccaacttcaagtccaacttcgacctggccgaggacgccaagctgcagctgtccaaggacacctacgacgacgacctggacaacctgctggcccagatcggcgaccagtacgccgacctgttcctggccgccaagaacctgtccgacgccatcctgctgtccgacatcctgcgggtgaacaccgagatcaccaaggcccccctgtccgcctccatgatcaagcggtacgacgagcaccaccaggacctgaccctgctgaaggccctggtgcggcagcagctgcccgagaagtacaaggagatcttcttcgaccagtccaagaacggctacgccggctacatcgacggcggcgcctcccaggaggagttctacaagttcatcaagcccatcctggagaagatggacggcaccgaggagctgctggtgaagctgaaccgggaggacctgctgcggaagcagcggaccttcgacaacggctccatcccccaccagatccacctgggcgagctgcacgccatcctgcggcggcaggaggacttctaccccttcctgaaggacaaccgggagaagatcgagaagatcctgaccttccggatcccctactacgtgggccccctggcccggggcaactcccggttcgcctggatgacccggaagtccgaggagaccatcaccccctggaacttcgaggaggtggtggacaagggcgcctccgcccagtccttcatcgagcggatgaccaacttcgacaagaacctgcccaacgagaaggtgctgcccaagcactccctgctgtacgagtacttcaccgtgtacaacgagctgaccaaggtgaagtacgtgaccgagggcatgcggaagcccgccttcctgtccggcgagcagaagaaggccatcgtggacctgctgttcaagaccaaccggaaggtgaccgtgaagcagctgaaggaggactacttcaagaagatcgagtgcttcgactccgtggagatctccggcgtggaggaccggttcaacgcctccctgggcacctaccacgacctgctgaagatcatcaaggacaaggacttcctggacaacgaggagaacgaggacatcctggaggacatcgtgctgaccctgaccctgttcgaggaccgggagatgatcgaggagcggctgaagacctacgcccacctgttcgacgacaaggtgatgaagcagctgaagcggcggcggtacaccggctggggccggctgtcccggaagctgatcaacggcatccgggacaagcagtccggcaagaccatcctggacttcctgaagtccgacggcttcgccaaccggaacttcatgcagctgatccacgacgactccctgaccttcaaggaggacatccagaaggcccaggtgtccggccagggcgactccctgcacgagcacatcgccaacctggccggctcccccgccatcaagaagggcatcctgcagaccgtgaaggtggtggacgagctggtgaaggtgatgggccggcacaagcccgagaacatcgtgatcgagatggcccgggagaaccagaccacccagaagggccagaagaactcccgggagcggatgaagcggatcgaggagggcatcaaggagctgggctcccagatcctgaaggagcaccccgtggagaacacccagctgcagaacgagaagctgtacctgtactacctgcagaacggccgggacatgtacgtggaccaggagctggacatcaaccggctgtccgactacgacgtggaccacatcgtgccccagtccttcctgaaggacgactccatcgacaacaaggtgctgacccggtccgacaagaaccggggcaagtccgacaacgtgccctccgaggaggtggtgaagaagatgaagaactactggcggcagctgctgaacgccaagctgatcacccagcggaagttcgacaacctgaccaaggccgagcggggcggcctgtccgagctggacaaggccggcttcatcaagcggcagctggtggagacccggcagatcaccaagcacgtggcccagatcctggactcccggatgaacaccaagtacgacgagaacgacaagctgatccgggaggtgaaggtgatcaccctgaagtccaagctggtgtccgacttccggaaggacttccagttctacaaggtgcgggagatcaacaactaccaccacgcccacgacgcctacctgaacgccgtggtgggcaccgccctgatcaagaagtaccccaagctggagtccgagttcgtgtacggcgactacaaggtgtacgacgtgcggaagatgatcgccaagtccgagcaggagatcggcaaggccaccgccaagtacttcttctactccaacatcatgaacttcttcaagaccgagatcaccctggccaacggcgagatccggaagcggcccctgatcgagaccaacggcgagaccggcgagatcgtgtgggacaagggccgggacttcgccaccgtgcggaaggtgctgtccatgccccaggtgaacatcgtgaagaagaccgaggtgcagaccggcggcttctccaaggagtccatcctgcccaagcggaactccgacaagctgatcgcccggaagaaggactgggaccccaagaagtacggcggcttcgactcccccaccgtggcctactccgtgctggtggtggccaaggtggagaagggcaagtccaagaagctgaagtccgtgaaggagctgctgggcatcaccatcatggagcggtcctccttcgagaagaaccccatcgacttcctggaggccaagggctacaaggaggtgaagaaggacctgatcatcaagctgcccaagtactccctgttcgagctggagaacggccggaagcggatgctggcctccgccggcgagctgcagaagggcaacgagctggccctgccctccaagtacgtgaacttcctgtacctggcctcccactacgagaagctgaagggctcccccgaggacaacgagcagaagcagctgttcgtggagcagcacaagcactacctggacgagatcatcgagcagatctccgagttctccaagcgggtgatcctggccgacgccaacctggacaaggtgctgtccgcctacaacaagcaccgggacaagcccatccgggagcaggccgagaacatcatccacctgttcaccctgaccaacctgggcgcccccgccgccttcaagtacttcgacaccaccatcgaccggaagcggtacacctccaccaaggaggtgctggacgccaccctgatccaccagtccatcaccggcctgtacgagacccggatcgacctgtcccagctgggcggcgacggcggcggctcccccaagaagaagcggaaggtgtgactagcaccagcctcaagaacacccgaatggagtctctaagctacataataccaacttacactttacaaaatgttgtcccccaaaatgtagccattcgtatctgctcctaataaaaagaaagtttcttcacattctctcgagaaaaaaaaaaaatggaaaaaaaaaaaacggaaaaaaaaaaaaggtaaaaaaaaaaaatataaaaaaaaaaaacataaaaaaaaaaaacgaaaaaaaaaaaacgtaaaaaaaaaaaactcaaaaaaaaaaaagataaaaaaaaaaaacctaaaaaaaaaaaatgtaaaaaaaaaaaagggaaaaaaaaaaaacgcaaaaaaaaaaaacacaaaaaaaaaaaatgcaaaaaaaaaaaatcgaaaaaaaaaaaatctaaaaaaaaaaaacgaaaaaaaaaaaacccaaaaaaaaaaaagacaaaaaaaaaaaatagaaaaaaaaaaaagttaaaaaaaaaaaactgaaaaaaaaaaaatttaaaaaaaaaaaatctag

SEQ ID NO: 347 - RNA, 5455 nt, synthetic construct
  misc_feature 1..5455: note = Synthetic
  source 1..5455: mol_type = other RNA
gggagacccaagctggctagcgtttaaacttaagctttcccgcagtcggcgtccagcggctctgcttgttcgtgtgtgtgtcgttgcaggccttattcggatccgccaccatggaagcaagcccggcaagcggaccgagacacctgatggacccgcacatcttcacaagcaacttcaacaacggaatcggaagacacaagacatacctgtgctacgaagtcgaaagactggacaacggaacaagcgtcaagatggaccagcacagaggattcctgcacaaccaggcaaagaacctgctgtgcggattctacggaagacacgcagaactgagattcctggacctggtcccgagcctgcagctggacccggcacagatctacagagtcacatggttcatcagctggagcccgtgcttcagctggggatgcgcaggagaagtcagagcatttctgcaggaaaacacacacgtcagactgagaatcttcgcagcaagaatctacgactacgacccgctgtacaaggaagcactgcagatgctgagagacgcaggagcacaggtcagcatcatgacatacgacgaattcaagcactgctgggacacattcgtcgaccaccagggatgcccgttccagccgtgggacggactggacgaacacagccaggcactgagcggaagactgagagcaatcctgcagaaccagggaaacggaggaggaggaagcgaagcagcagcaaaggaagcagcagcaaaggacaagaagtacagcatcggactggccatcggaacaaacagcgtcggatgggcagtcatcacagacgaatacaaggtcccgagcaagaagttcaaggtcctgggaaacacagacagacacagcatcaagaagaacctgatcggagcactgctgttcgacagcggagaaacagcagaagcaacaagactgaagagaacagcaagaagaagatacacaagaagaaagaacagaatctgctacctgcaggaaatcttcagcaacgaaatggcaaaggtcgacgacagcttcttccacagactggaagaaagcttcctggtcgaagaagacaagaagcacgaaagacacccgatcttcggaaacatcgtcgacgaagtcgcataccacgaaaagtacccgacaatctaccacctgagaaagaagctggtcgacagcacagacaaggcagacctgagactgatctacctggcactggcacacatgatcaagttcagaggacacttcctgatcgaaggagacctgaacccggacaacagcgacgtcgacaagctgttcatccagctggtccagacatacaaccagctgttcgaagaaaacccgatcaacgcaagcggagtcgacgcaaaggcaatcctgagcgcaagactgagcaagagcagaagactggaaaacctgatcgcacagctgccgggagaaaagaagaacggactgttcggaaacctgatcgcactgagcctgggactgacaccgaacttcaagagcaacttcgacctggcagaagacgcaaagctgcagctgagcaaggacacatacgacgacgacctggacaacctgctggcacagatcggagaccagtacgcagacctgttcctggcagcaaagaacctgagcgacgcaatcctgctgagcgacatcctgagagtcaacacagaaatcacaaaggcaccgctgagcgcaagcatgatcaagagatacgacgaacaccaccaggacctgacactgctgaaggcactggtcagacagcagctgccggaaaagtacaaggaaatcttcttcgaccagagcaagaacggatacgcaggatacatcgacggaggagcaagccaggaagaattctacaagttcatcaagccgatcctggaaaagatggacggaacagaagaactgctggtcaagctgaacagagaagacctgctgagaaagcagagaacattcgacaacggaagcatcccgcaccagatccacctgggagaactgcacgcaatcctgagaagacaggaagacttctacccgttcctgaaggacaacagagaaaagatcgaaaagatcctgacattcagaatcccgtactacgtcggaccgctggcaagaggaaacagcagattcgcatggatgacaagaaagagcgaagaaacaatcacaccgtggaacttcgaagaagtcgtcgacaagggagcaagcgcacagagcttcatcgaaagaatgacaaacttcgacaagaacctgccgaacgaaaaggtcctgccgaagcacagcctgctgtacgaatacttcacagtctacaacgaactgacaaaggtcaagtacgtcacagaaggaatgagaaagccggcattcctgagcggagaacagaagaaggcaatcgtcgacctgctgttcaagacaaacagaaaggtcacagtcaagcagctgaaggaagactacttcaagaagatcgaatgcttcgacagcgtcgaaatcagcggagtcgaagacagattcaacgcaagcctgggaacataccacgacctgctgaagatcatcaaggacaaggacttcctggacaacgaagaaaacgaagacatcctggaagacatcgtcctgacactgacactgttcgaagacagagaaatgatcgaagaaagactgaagacatacgcacacctgttcgacgacaaggtcatgaagcagctgaagagaagaagatacacaggatggggaagactgagcagaaagctgatcaacggaatcagagacaagcagagcggaaagacaatcctggacttcctgaagagcgacggattcgcaaacagaaacttcatgcagctgatccacgacgacagcctgacattcaaggaagacatccagaaggcacaggtcagcggacagggagacagcctgcacgaacacatcgcaaacctggcaggaagcccggcaatcaagaagggaatcctgcagacagtcaaggtcgtcgacgaactggtcaaggtcatgggaagacacaagccggaaaacatcgtcatcgaaatggcaagagaaaaccagacaacacagaagggacagaagaacagcagagaaagaatgaagagaatcgaagaaggaatcaaggaactgggaagccagatcctgaaggaacacccggtcgaaaacacacagctgcagaacgaaaagctgtacctgtactacctgcagaacggaagagacatgtacgtcgaccaggaactggacatcaacagactgagcgactacgacgtcgaccacatcgtcccgcagagcttcctgaaggacgacagcatcgacaacaaggtcctgacaagaagcgacaagaacagaggaaagagcgacaacgtcccgagcgaagaagtcgtcaagaagatgaagaactactggagacagctgctgaacgcaaagctgatcacacagagaaagttcgacaacctgacaaaggcagagagaggaggactgagcgaactggacaaggcaggattcatcaagagacagctggtcgaaacaagacagatcacaaagcacgtcgcacagatcctggacagcagaatgaacacaaagtacgacgaaaacgacaagctgatcagagaagtcaaggtcatcacactgaagagcaagctggtcagcgacttcagaaaggacttccagttctacaaggtcagagaaatcaacaactaccaccacgcacacgacgcatacctgaacgcagtcgtcggaacagcactgatcaagaagtacccgaagctggaaagcgaattcgtctacggagactacaaggtctacgacgtcagaaagatgatcgcaaagagcgaacaggaaatcggaaaggcaacagcaaagtacttcttctacagcaacatcatgaacttcttcaagacagaaatcacactggcaaacggagaaatcagaaagagaccgctgatcgaaacaaacggagaaacaggagaaatcgtctgggacaagggaagagacttcgcaacagtcagaaaggtcctgagcatgccgcaggtcaacatcgtcaagaagacagaagtccagacaggaggattcagcaaggaaagcatcctgccgaagagaaacagcgacaagctgatcgcaagaaagaaggactgggacccgaagaagtacggaggattcgacagcccgacagtcgcatacagcgtcctggtcgtcgcaaaggtcgaaaagggaaagagcaagaagctgaagagcgtcaaggaactgctgggaatcacaatcatggaaagaagcagcttcgaaaagaacccgatcgacttcctggaagcaaagggatacaaggaagtcaagaaggacctgatcatcaagctgccgaagtacagcctgttcgaactggaaaacggaagaaagagaatgctggcaagcgcaggagaactgcagaagggaaacgaactggcactgccgagcaagtacgtcaacttcctgtacctggcaagccactacgaaaagctgaagggaagcccggaagacaacgaacagaagcagctgttcgtcgaacagcacaagcactacctggacgaaatcatcgaacagatcagcgaattcagcaagagagtcatcctggcagacgcaaacctggacaaggtcctgagcgcatacaacaagcacagagacaagccgatcagagaacaggcagaaaacatcatccacctgttcacactgacaaacctgggagcaccggcagcattcaagtacttcgacacaacaatcgacagaaagagatacacaagcacaaaggaagtcctggacgcaacactgatccaccagagcatcacaggactgtacgaaacaagaatcgatctgagccagctgggaggagacagcggaggaagcacaaacctgagcgacatcatcgaaaaggaaacaggaaagcagctggtcatccaggaaagcatcctgatgctgccggaagaagtcgaagaagtcatcggaaacaagccggaaagcgacatcctggtccacacagcatacgacgaaagcacagacgaaaacgtcatgctgctgacaagcgacgcaccggaatacaagccgtgggcactggtcatccaggacagcaacggagaaaacaagatcaagatgctgagcggaggaagcccgaagaagaagagaaaggtctaatagtctagacatcacatttaaaagcatctcagcctaccatgagaataagagaaagaaaatgaagatcaatagcttattcatctctttttctttttcgttggtgtaaagccaacaccctgtctaaaaaacataaatttctttaatcattttgcctcttttctctgtgcttcaattaataaaaaatggaaagaacctcgagaaaaaaaaaaaaaaaaaaaaaaaaaaaaaagcgaaaaaaaaaaaaaaaaaaaaaaaaaaaaaaccgaaaaaaaaaaaaaaaaaaaaaaaaaaaaaaaaaaaaaaat

SEQ ID NO: 348 - RNA, 5455 nt, synthetic construct
  misc_feature 1..5455: note = Synthetic
  source 1..5455: mol_type = other RNA
gggagacccaagctggctagcgtttaaacttaagctttcccgcagtcggcgtccagcggctctgcttgttcgtgtgtgtgtcgttgcaggccttattcggatccgccaccatggaagcaagcccggcaagcggaccgagacacctgatggacccgcacatcttcacaagcaacttcaacaacggaatcggaagacacaagacatacctgtgctacgaagtcgaaagactggacaacggaacaagcgtcaagatggaccagcacagaggattcctgcacaaccaggcaaagaacctgctgtgcggattctacggaagacacgcagaactgagattcctggacctggtcccgagcctgcagctggacccggcacagatctacagagtcacatggttcatcagctggagcccgtgcttcagctggggatgcgcaggagaagtcagagcatttctgcaggaaaacacacacgtcagactgagaatcttcgcagcaagaatctacgactacgacccgctgtacaaggaagcactgcagatgctgagagacgcaggagcacaggtcagcatcatgacatacgacgaattcaagcactgctgggacacattcgtcgaccaccagggatgcccgttccagccgtgggacggactggacgaacacagccaggcactgagcggaagactgagagcaatcctgcagaaccagggaaacgaggccgccgccaagggcggcggcggcagcggcggcggcggcagcgacaagaagtacagcatcggactggccatcggaacaaacagcgtcggatgggcagtcatcacagacgaatacaaggtcccgagcaagaagttcaaggtcctgggaaacacagacagacacagcatcaagaagaacctgatcggagcactgctgttcgacagcggagaaacagcagaagcaacaagactgaagagaacagcaagaagaagatacacaagaagaaagaacagaatctgctacctgcaggaaatcttcagcaacgaaatggcaaaggtcgacgacagcttcttccacagactggaagaaagcttcctggtcgaagaagacaagaagcacgaaagacacccgatcttcggaaacatcgtcgacgaagtcgcataccacgaaaagtacccgacaatctaccacctgagaaagaagctggtcgacagcacagacaaggcagacctgagactgatctacctggcactggcacacatgatcaagttcagaggacacttcctgatcgaaggagacctgaacccggacaacagcgacgtcgacaagctgttcatccagctggtccagacatacaaccagctgttcgaagaaaacccgatcaacgcaagcggagtcgacgcaaaggcaatcctgagcgcaagactgagcaagagcagaagactggaaaacctgatcgcacagctgccgggagaaaagaagaacggactgttcggaaacctgatcgcactgagcctgggactgacaccgaacttcaagagcaacttcgacctggcagaagacgcaaagctgcagctgagcaaggacacatacgacgacgacctggacaacctgctggcacagatcggagaccagtacgcagacctgttcctggcagcaaagaacctgagcgacgcaatcctgctgagcgacatcctgagagtcaacacagaaatcacaaaggcaccgctgagcgcaagcatgatcaagagatacgacgaacaccaccaggacctgacactgctgaaggcactggtcagacagcagctgccggaaaagtacaaggaaatcttcttcgaccagagcaagaacggatacgcaggatacatcgacggaggagcaagccaggaagaattctacaagttcatcaagccgatcctggaaaagatggacggaacagaagaactgctggtcaagctgaacagagaagacctgctgagaaagcagagaacattcgacaacggaagcatcccgcaccagatccacctgggagaactgcacgcaatcctgagaagacaggaagacttctacccgttcctgaaggacaacagagaaaagatcgaaaagatcctgacattcagaatcccgtactacgtcggaccgctggcaagaggaaacagcagattcgcatggatgacaagaaagagcgaagaaacaatcacaccgtggaacttcgaagaagtcgtcgacaagggagcaagcgcacagagcttcatcgaaagaatgacaaacttcgacaagaacctgccgaacgaaaaggtcctgccgaagcacagcctgctgtacgaatacttcacagtctacaacgaactgacaaaggtcaagtacgtcacagaaggaatgagaaagccggcattcctgagcggagaacagaagaaggcaatcgtcgacctgctgttcaagacaaacagaaaggtcacagtcaagcagctgaaggaagactacttcaagaagatcgaatgcttcgacagcgtcgaaatcagcggagtcgaagacagattcaacgcaagcctgggaacataccacgacctgctgaagatcatcaaggacaaggacttcctggacaacgaagaaaacgaagacatcctggaagacatcgtcctgacactgacactgttcgaagacagagaaatgatcgaagaaagactgaagacatacgcacacctgttcgacgacaaggtcatgaagcagctgaagagaagaagatacacaggatggggaagactgagcagaaagctgatcaacggaatcagagacaagcagagcggaaagacaatcctggacttcctgaagagcgacggattcgcaaacagaaacttcatgcagctgatccacgacgacagcctgacattcaaggaagacatccagaaggcacaggtcagcggacagggagacagcctgcacgaacacatcgcaaacctggcaggaagcccggcaatcaagaagggaatcctgcagacagtcaaggtcgtcgacgaactggtcaaggtcatgggaagacacaagccggaaaacatcgtcatcgaaatggcaagagaaaaccagacaacacagaagggacagaagaacagcagagaaagaatgaagagaatcgaagaaggaatcaaggaactgggaagccagatcctgaaggaacacccggtcgaaaacacacagctgcagaacgaaaagctgtacctgtactacctgcagaacggaagagacatgtacgtcgaccaggaactggacatcaacagactgagcgactacgacgtcgaccacatcgtcccgcagagcttcctgaaggacgacagcatcgacaacaaggtcctgacaagaagcgacaagaacagaggaaagagcgacaacgtcccgagcgaagaagtcgtcaagaagatgaagaactactggagacagctgctgaacgcaaagctgatcacacagagaaagttcgacaacctgacaaaggcagagagaggaggactgagcgaactggacaaggcaggattcatcaagagacagctggtcgaaacaagacagatcacaaagcacgtcgcacagatcctggacagcagaatgaacacaaagtacgacgaaaacgacaagctgatcagagaagtcaaggtcatcacactgaagagcaagctggtcagcgacttcagaaaggacttccagttctacaaggtcagagaaatcaacaactaccaccacgcacacgacgcatacctgaacgcagtcgtcggaacagcactgatcaagaagtacccgaagctggaaagcgaattcgtctacggagactacaaggtctacgacgtcagaaagatgatcgcaaagagcgaacaggaaatcggaaaggcaacagcaaagtacttcttctacagcaacatcatgaacttcttcaagacagaaatcacactggcaaacggagaaatcagaaagagaccgctgatcgaaacaaacggagaaacaggagaaatcgtctgggacaagggaagagacttcgcaacagtcagaaaggtcctgagcatgccgcaggtcaacatcgtcaagaagacagaagtccagacaggaggattcagcaaggaaagcatcctgccgaagagaaacagcgacaagctgatcgcaagaaagaaggactgggacccgaagaagtacggaggattcgacagcccgacagtcgcatacagcgtcctggtcgtcgcaaaggtcgaaaagggaaagagcaagaagctgaagagcgtcaaggaactgctgggaatcacaatcatggaaagaagcagcttcgaaaagaacccgatcgacttcctggaagcaaagggatacaaggaagtcaagaaggacctgatcatcaagctgccgaagtacagcctgttcgaactggaaaacggaagaaagagaatgctggcaagcgcaggagaactgcagaagggaaacgaactggcactgccgagcaagtacgtcaacttcctgtacctggcaagccactacgaaaagctgaagggaagcccggaagacaacgaacagaagcagctgttcgtcgaacagcacaagcactacctggacgaaatcatcgaacagatcagcgaattcagcaagagagtcatcctggcagacgcaaacctggacaaggtcctgagcgcatacaacaagcacagagacaagccgatcagagaacaggcagaaaacatcatccacctgttcacactgacaaacctgggagcaccggcagcattcaagtacttcgacacaacaatcgacagaaagagatacacaagcacaaaggaagtcctggacgcaacactgatccaccagagcatcacaggactgtacgaaacaagaatcgatctgagccagctgggaggagacagcggaggaagcacaaacctgagcgacatcatcgaaaaggaaacaggaaagcagctggtcatccaggaaagcatcctgatgctgccggaagaagtcgaagaagtcatcggaaacaagccggaaagcgacatcctggtccacacagcatacgacgaaagcacagacgaaaacgtcatgctgctgacaagcgacgcaccggaatacaagccgtgggcactggtcatccaggacagcaacggagaaaacaagatcaagatgctgagcggaggaagcccgaagaagaagagaaaggtctaatagtctagacatcacatttaaaagcatctcagcctaccatgagaataagagaaagaaaatgaagatcaatagcttattcatctctttttctttttcgttggtgtaaagccaacaccctgtctaaaaaacataaatttctttaatcattttgcctcttttctctgtgcttcaattaataaaaaatggaaagaacctcgagaaaaaaaaaaaaaaaaaaaaaaaaaaaaaagcgaaaaaaaaaaaaaaaaaaaaaaaaaaaaaaccgaaaaaaaaaaaaaaaaaaaaaaaaaaaaaaaaaaaaaaat

SEQ ID NO: 349 - RNA, 5455 nt, synthetic construct
  misc_feature 1..5455: note = Synthetic
  source 1..5455: mol_type = other RNA
gggagacccaagctggctagcgtttaaacttaagctttcccgcagtcggcgtccagcggctctgcttgttcgtgtgtgtgtcgttgcaggccttattcggatccgccaccatggaagcaagcccggcaagcggaccgagacacctgatggacccgcacatcttcacaagcaacttcaacaacggaatcggaagacacaagacatacctgtgctacgaagtcgaaagactggacaacggaacaagcgtcaagatggaccagcacagaggattcctgcacaaccaggcaaagaacctgctgtgcggattctacggaagacacgcagaactgagattcctggacctggtcccgagcctgcagctggacccggcacagatctacagagtcacatggttcatcagctggagcccgtgcttcagctggggatgcgcaggagaagtcagagcatttctgcaggaaaacacacacgtcagactgagaatcttcgcagcaagaatctacgactacgacccgctgtacaaggaagcactgcagatgctgagagacgcaggagcacaggtcagcatcatgacatacgacgaattcaagcactgctgggacacattcgtcgaccaccagggatgcccgttccagccgtgggacggactggacgaacacagccaggcactgagcggaagactgagagcaatcctgcagaaccagggaaacgaggccgccgccaaggaggccgccgccaaggaggccgccgccaaggacaagaagtacagcatcggactggccatcggaacaaacagcgtcggatgggcagtcatcacagacgaatacaaggtcccgagcaagaagttcaaggtcctgggaaacacagacagacacagcatcaagaagaacctgatcggagcactgctgttcgacagcggagaaacagcagaagcaacaagactgaagagaacagcaagaagaagatacacaagaagaaagaacagaatctgctacctgcaggaaatcttcagcaacgaaatggcaaaggtcgacgacagcttcttccacagactggaagaaagcttcctggtcgaagaagacaagaagcacgaaagacacccgatcttcggaaacatcgtcgacgaagtcgcataccacgaaaagtacccgacaatctaccacctgagaaagaagctggtcgacagcacagacaaggcagacctgagactgatctacctggcactggcacacatgatcaagttcagaggacacttcctgatcgaaggagacctgaacccggacaacagcgacgtcgacaagctgttcatccagctggtccagacatacaaccagctgttcgaagaaaacccgatcaacgcaagcggagtcgacgcaaaggcaatcctgagcgcaagactgagcaagagcagaagactggaaaacctgatcgcacagctgccgggagaaaagaagaacggactgttcggaaacctgatcgcactgagcctgggactgacaccgaacttcaagagcaacttcgacctggcagaagacgcaaagctgcagctgagcaaggacacatacgacgacgacctggacaacctgctggcacagatcggagaccagtacgcagacctgttcctggcagcaaagaacctgagcgacgcaatcctgctgagcgacatcctgagagtcaacacagaaatcacaaaggcaccgctgagcgcaagcatgatcaagagatacgacgaacaccaccaggacctgacactgctgaaggcactggtcagacagcagctgccggaaaagtacaaggaaatcttcttcgaccagagcaagaacggatacgcaggatacatcgacggaggagcaagccaggaagaattctacaagttcatcaagccgatcctggaaaagatggacggaacagaagaactgctggtcaagctgaacagagaagacctgctgagaaagcagagaacattcgacaacggaagcatcccgcaccagatccacctgggagaactgcacgcaatcctgagaagacaggaagacttctacccgttcctgaaggacaacagagaaaagatcgaaaagatcctgacattcagaatcccgtactacgtcggaccgctggcaagaggaaacagcagattcgcatggatgacaagaaagagcgaagaaacaatcacaccgtggaacttcgaagaagtcgtcgacaagggagcaagcgcacagagcttcatcgaaagaatgacaaacttcgacaagaacctgccgaacgaaaaggtcctgccgaagcacagcctgctgtacgaatacttcacagtctacaacgaactgacaaaggtcaagtacgtcacagaaggaatgagaaagccggcattcctgagcggagaacagaagaaggcaatcgtcgacctgctgttcaagacaaacagaaaggtcacagtcaagcagctgaaggaagactacttcaagaagatcgaatgcttcgacagcgtcgaaatcagcggagtcgaagacagattcaacgcaagcctgggaacataccacgacctgctgaagatcatcaaggacaaggacttcctggacaacgaagaaaacgaagacatcctggaagacatcgtcctgacactgacactgttcgaagacagagaaatgatcgaagaaagactgaagacatacgcacacctgttcgacgacaaggtcatgaagcagctgaagagaagaagatacacaggatggggaagactgagcagaaagctgatcaacggaatcagagacaagcagagcggaaagacaatcctggacttcctgaagagcgacggattcgcaaacagaaacttcatgcagctgatccacgacgacagcctgacattcaaggaagacatccagaaggcacaggtcagcggacagggagacagcctgcacgaacacatcgcaaacctggcaggaagcccggcaatcaagaagggaatcctgcagacagtcaaggtcgtcgacgaactggtcaaggtcatgggaagacacaagccggaaaacatcgtcatcgaaatggcaagagaaaaccagacaacacagaagggacagaagaacagcagagaaagaatgaagagaatcgaagaaggaatcaaggaactgggaagccagatcctgaaggaacacccggtcgaaaacacacagctgcagaacgaaaagctgtacctgtactacctgcagaacggaagagacatgtacgtcgaccaggaactggacatcaacagactgagcgactacgacgtcgaccacatcgtcccgcagagcttcctgaaggacgacagcatcgacaacaaggtcctgacaagaagcgacaagaacagaggaaagagcgacaacgtcccgagcgaagaagtcgtcaagaagatgaagaactactggagacagctgctgaacgcaaagctgatcacacagagaaagttcgacaacctgacaaaggcagagagaggaggactgagcgaactggacaaggcaggattcatcaagagacagctggtcgaaacaagacagatcacaaagcacgtcgcacagatcctggacagcagaatgaacacaaagtacgacgaaaacgacaagctgatcagagaagtcaaggtcatcacactgaagagcaagctggtcagcgacttcagaaaggacttccagttctacaaggtcagagaaatcaacaactaccaccacgcacacgacgcatacctgaacgcagtcgtcggaacagcactgatcaagaagtacccgaagctggaaagcgaattcgtctacggagactacaaggtctacgacgtcagaaagatgatcgcaaagagcgaacaggaaatcggaaaggcaacagcaaagtacttcttctacagcaacatcatgaacttcttcaagacagaaatcacactggcaaacggagaaatcagaaagagaccgctgatcgaaacaaacggagaaacaggagaaatcgtctgggacaagggaagagacttcgcaacagtcagaaaggtcctgagcatgccgcaggtcaacatcgtcaagaagacagaagtccagacaggaggattcagcaaggaaagcatcctgccgaagagaaacagcgacaagctgatcgcaagaaagaaggactgggacccgaagaagtacggaggattcgacagcccgacagtcgcatacagcgtcctggtcgtcgcaaaggtcgaaaagggaaagagcaagaagctgaagagcgtcaaggaactgctgggaatcacaatcatggaaagaagcagcttcgaaaagaacccgatcgacttcctggaagcaaagggatacaaggaagtcaagaaggacctgatcatcaagctgccgaagtacagcctgttcgaactggaaaacggaagaaagagaatgctggcaagcgcaggagaactgcagaagggaaacgaactggcactgccgagcaagtacgtcaacttcctgtacctggcaagccactacgaaaagctgaagggaagcccggaagacaacgaacagaagcagctgttcgtcgaacagcacaagcactacctggacgaaatcatcgaacagatcagcgaattcagcaagagagtcatcctggcagacgcaaacctggacaaggtcctgagcgcatacaacaagcacagagacaagccgatcagagaacaggcagaaaacatcatccacctgttcacactgacaaacctgggagcaccggcagcattcaagtacttcgacacaacaatcgacagaaagagatacacaagcacaaaggaagtcctggacgcaacactgatccaccagagcatcacaggactgtacgaaacaagaatcgatctgagccagctgggaggagacagcggaggaagcacaaacctgagcgacatcatcgaaaaggaaacaggaaagcagctggtcatccaggaaagcatcctgatgctgccggaagaagtcgaagaagtcatcggaaacaagccggaaagcgacatcctggtccacacagcatacgacgaaagcacagacgaaaacgtcatgctgctgacaagcgacgcaccggaatacaagccgtgggcactggtcatccaggacagcaacggagaaaacaagatcaagatgctgagcggaggaagcccgaagaagaagagaaaggtctaatagtctagacatcacatttaaaagcatctcagcctaccatgagaataagagaaagaaaatgaagatcaatagcttattcatctctttttctttttcgttggtgtaaagccaacaccctgtctaaaaaacataaatttctttaatcattttgcctcttttctctgtgcttcaattaataaaaaatggaaagaacctcgagaaaaaaaaaaaaaaaaaaaaaaaaaaaaaagcgaaaaaaaaaaaaaaaaaaaaaaaaaaaaaaccgaaaaaaaaaaaaaaaaaaaaaaaaaaaaaaaaaaaaaaat

SEQ ID NO: 350 - RNA, 5470 nt, synthetic construct
  misc_feature 1..5470: note = Synthetic
  source 1..5470: mol_type = other RNA
gggagacccaagctggctagcgtttaaacttaagctttcccgcagtcggcgtccagcggctctgcttgttcgtgtgtgtgtcgttgcaggccttattcggatccgccaccatggaagcaagcccggcaagcggaccgagacacctgatggacccgcacatcttcacaagcaacttcaacaacggaatcggaagacacaagacatacctgtgctacgaagtcgaaagactggacaacggaacaagcgtcaagatggaccagcacagaggattcctgcacaaccaggcaaagaacctgctgtgcggattctacggaagacacgcagaactgagattcctggacctggtcccgagcctgcagctggacccggcacagatctacagagtcacatggttcatcagctggagcccgtgcttcagctggggatgcgcaggagaagtcagagcatttctgcaggaaaacacacacgtcagactgagaatcttcgcagcaagaatctacgactacgacccgctgtacaaggaagcactgcagatgctgagagacgcaggagcacaggtcagcatcatgacatacgacgaattcaagcactgctgggacacattcgtcgaccaccagggatgcccgttccagccgtgggacggactggacgaacacagccaggcactgagcggaagactgagagcaatcctgcagaaccagggaaacggcggcggcggcagcggcggcggcggcagcggcggcggcggcagcggcggcggcggcagcgacaagaagtacagcatcggactggccatcggaacaaacagcgtcggatgggcagtcatcacagacgaatacaaggtcccgagcaagaagttcaaggtcctgggaaacacagacagacacagcatcaagaagaacctgatcggagcactgctgttcgacagcggagaaacagcagaagcaacaagactgaagagaacagcaagaagaagatacacaagaagaaagaacagaatctgctacctgcaggaaatcttcagcaacgaaatggcaaaggtcgacgacagcttcttccacagactggaagaaagcttcctggtcgaagaagacaagaagcacgaaagacacccgatcttcggaaacatcgtcgacgaagtcgcataccacgaaaagtacccgacaatctaccacctgagaaagaagctggtcgacagcacagacaaggcagacctgagactgatctacctggcactggcacacatgatcaagttcagaggacacttcctgatcgaaggagacctgaacccggacaacagcgacgtcgacaagctgttcatccagctggtccagacatacaaccagctgttcgaagaaaacccgatcaacgcaagcggagtcgacgcaaaggcaatcctgagcgcaagactgagcaagagcagaagactggaaaacctgatcgcacagctgccgggagaaaagaagaacggactgttcggaaacctgatcgcactgagcctgggactgacaccgaacttcaagagcaacttcgacctggcagaagacgcaaagctgcagctgagcaaggacacatacgacgacgacctggacaacctgctggcacagatcggagaccagtacgcagacctgttcctggcagcaaagaacctgagcgacgcaatcctgctgagcgacatcctgagagtcaacacagaaatcacaaaggcaccgctgagcgcaagcatgatcaagagatacgacgaacaccaccaggacctgacactgctgaaggcactggtcagacagcagctgccggaaaagtacaaggaaatcttcttcgaccagagcaagaacggatacgcaggatacatcgacggaggagcaagccaggaagaattctacaagttcatcaagccgatcctggaaaagatggacggaacagaagaactgctggtcaagctgaacagagaagacctgctgagaaagcagagaacattcgacaacggaagcatcccgcaccagatccacctgggagaactgcacgcaatcctgagaagacaggaagacttctacccgttcctgaaggacaacagagaaaagatcgaaaagatcctgacattcagaatcccgtactacgtcggaccgctggcaagaggaaacagcagattcgcatggatgacaagaaagagcgaagaaacaatcacaccgtggaacttcgaagaagtcgtcgacaagggagcaagcgcacagagcttcatcgaaagaatgacaaacttcgacaagaacctgccgaacgaaaaggtcctgccgaagcacagcctgctgtacgaatacttcacagtctacaacgaactgacaaaggtcaagtacgtcacagaaggaatgagaaagccggcattcctgagcggagaacagaagaaggcaatcgtcgacctgctgttcaagacaaacagaaaggtcacagtcaagcagctgaaggaagactacttcaagaagatcgaatgcttcgacagcgtcgaaatcagcggagtcgaagacagattcaacgcaagcctgggaacataccacgacctgctgaagatcatcaaggacaaggacttcctggacaacgaagaaaacgaagacatcctggaagacatcgtcctgacactgacactgttcgaagacagagaaatgatcgaagaaagactgaagacatacgcacacctgttcgacgacaaggtcatgaagcagctgaagagaagaagatacacaggatggggaagactgagcagaaagctgatcaacggaatcagagacaagcagagcggaaagacaatcctggacttcctgaagagcgacggattcgcaaacagaaacttcatgcagctgatccacgacgacagcctgacattcaaggaagacatccagaaggcacaggtcagcggacagggagacagcctgcacgaacacatcgcaaacctggcaggaagcccggcaatcaagaagggaatcctgcagacagtcaaggtcgtcgacgaactggtcaaggtcatgggaagacacaagccggaaaacatcgtcatcgaaatggcaagagaaaaccagacaacacagaagggacagaagaacagcagagaaagaatgaagagaatcgaagaaggaatcaaggaactgggaagccagatcctgaaggaacacccggtcgaaaacacacagctgcagaacgaaaagctgtacctgtactacctgcagaacggaagagacatgtacgtcgaccaggaactggacatcaacagactgagcgactacgacgtcgaccacatcgtcccgcagagcttcctgaaggacgacagcatcgacaacaaggtcctgacaagaagcgacaagaacagaggaaagagcgacaacgtcccgagcgaagaagtcgtcaagaagatgaagaactactggagacagctgctgaacgcaaagctgatcacacagagaaagttcgacaacctgacaaaggcagagagaggaggactgagcgaactggacaaggcaggattcatcaagagacagctggtcgaaacaagacagatcacaaagcacgtcgcacagatcctggacagcagaatgaacacaaagtacgacgaaaacgacaagctgatcagagaagtcaaggtcatcacactgaagagcaagctggtcagcgacttcagaaaggacttccagttctacaaggtcagagaaatcaacaactaccaccacgcacacgacgcatacctgaacgcagtcgtcggaacagcactgatcaagaagtacccgaagctggaaagcgaattcgtctacggagactacaaggtctacgacgtcagaaagatgatcgcaaagagcgaacaggaaatcggaaaggcaacagcaaagtacttcttctacagcaacatcatgaacttcttcaagacagaaatcacactggcaaacggagaaatcagaaagagaccgctgatcgaaacaaacggagaaacaggagaaatcgtctgggacaagggaagagacttcgcaacagtcagaaaggtcctgagcatgccgcaggtcaacatcgtcaagaagacagaagtccagacaggaggattcagcaaggaaagcatcctgccgaagagaaacagcgacaagctgatcgcaagaaagaaggactgggacccgaagaagtacggaggattcgacagcccgacagtcgcatacagcgtcctggtcgtcgcaaaggtcgaaaagggaaagagcaagaagctgaagagcgtcaaggaactgctgggaatcacaatcatggaaagaagcagcttcgaaaagaacccgatcgacttcctggaagcaaagggatacaaggaagtcaagaaggacctgatcatcaagctgccgaagtacagcctgttcgaactggaaaacggaagaaagagaatgctggcaagcgcaggagaactgcagaagggaaacgaactggcactgccgagcaagtacgtcaacttcctgtacctggcaagccactacgaaaagctgaagggaagcccggaagacaacgaacagaagcagctgttcgtcgaacagcacaagcactacctggacgaaatcatcgaacagatcagcgaattcagcaagagagtcatcctggcagacgcaaacctggacaaggtcctgagcgcatacaacaagcacagagacaagccgatcagagaacaggcagaaaacatcatccacctgttcacactgacaaacctgggagcaccggcagcattcaagtacttcgacacaacaatcgacagaaagagatacacaagcacaaaggaagtcctggacgcaacactgatccaccagagcatcacaggactgtacgaaacaagaatcgatctgagccagctgggaggagacagcggaggaagcacaaacctgagcgacatcatcgaaaaggaaacaggaaagcagctggtcatccaggaaagcatcctgatgctgccggaagaagtcgaagaagtcatcggaaacaagccggaaagcgacatcctggtccacacagcatacgacgaaagcacagacgaaaacgtcatgctgctgacaagcgacgcaccggaatacaagccgtgggcactggtcatccaggacagcaacggagaaaacaagatcaagatgctgagcggaggaagcccgaagaagaagagaaaggtctaatagtctagacatcacatttaaaagcatctcagcctaccatgagaataagagaaagaaaatgaagatcaatagcttattcatctctttttctttttcgttggtgtaaagccaacaccctgtctaaaaaacataaatttctttaatcattttgcctcttttctctgtgcttcaattaataaaaaatggaaagaacctcgagaaaaaaaaaaaaaaaaaaaaaaaaaaaaaagcgaaaaaaaaaaaaaaaaaaaaaaaaaaaaaaccgaaaaaaaaaaaaaaaaaaaaaaaaaaaaaaaaaaaaaaat

SEQ ID NO: 351 - RNA, 5470 nt, synthetic construct
  misc_feature 1..5470: note = Synthetic
  source 1..5470: mol_type = other RNA
gggagacccaagctggctagcgtttaaacttaagctttcccgcagtcggcgtccagcggctctgcttgttcgtgtgtgtgtcgttgcaggccttattcggatccgccaccatggaagcaagcccggcaagcggaccgagacacctgatggacccgcacatcttcacaagcaacttcaacaacggaatcggaagacacaagacatacctgtgctacgaagtcgaaagactggacaacggaacaagcgtcaagatggaccagcacagaggattcctgcacaaccaggcaaagaacctgctgtgcggattctacggaagacacgcagaactgagattcctggacctggtcccgagcctgcagctggacccggcacagatctacagagtcacatggttcatcagctggagcccgtgcttcagctggggatgcgcaggagaagtcagagcatttctgcaggaaaacacacacgtcagactgagaatcttcgcagcaagaatctacgactacgacccgctgtacaaggaagcactgcagatgctgagagacgcaggagcacaggtcagcatcatgacatacgacgaattcaagcactgctgggacacattcgtcgaccaccagggatgcccgttccagccgtgggacggactggacgaacacagccaggcactgagcggaagactgagagcaatcctgcagaaccagggaaacggcggcggcggcagcggaggaggaggaagcgaagccgccgccaaagaggccgccgccaaggacaagaagtacagcatcggactggccatcggaacaaacagcgtcggatgggcagtcatcacagacgaatacaaggtcccgagcaagaagttcaaggtcctgggaaacacagacagacacagcatcaagaagaacctgatcggagcactgctgttcgacagcggagaaacagcagaagcaacaagactgaagagaacagcaagaagaagatacacaagaagaaagaacagaatctgctacctgcaggaaatcttcagcaacgaaatggcaaaggtcgacgacagcttcttccacagactggaagaaagcttcctggtcgaagaagacaagaagcacgaaagacacccgatcttcggaaacatcgtcgacgaagtcgcataccacgaaaagtacccgacaatctaccacctgagaaagaagctggtcgacagcacagacaaggcagacctgagactgatctacctggcactggcacacatgatcaagttcagaggacacttcctgatcgaaggagacctgaacccggacaacagcgacgtcgacaagctgttcatccagctggtccagacatacaaccagctgttcgaagaaaacccgatcaacgcaagcggagtcgacgcaaaggcaatcctgagcgcaagactgagcaagagcagaagactggaaaacctgatcgcacagctgccgggagaaaagaagaacggactgttcggaaacctgatcgcactgagcctgggactgacaccgaacttcaagagcaacttcgacctggcagaagacgcaaagctgcagctgagcaaggacacatacgacgacgacctggacaacctgctggcacagatcggagaccagtacgcagacctgttcctggcagcaaagaacctgagcgacgcaatcctgctgagcgacatcctgagagtcaacacagaaatcacaaaggcaccgctgagcgcaagcatgatcaagagatacgacgaacaccaccaggacctgacactgctgaaggcactggtcagacagcagctgccggaaaagtacaaggaaatcttcttcgaccagagcaagaacggatacgcaggatacatcgacggaggagcaagccaggaagaattctacaagttcatcaagccgatcctggaaaagatggacggaacagaagaactgctggtcaagctgaacagagaagacctgctgagaaagcagagaacattcgacaacggaagcatcccgcaccagatccacctgggagaactgcacgcaatcctgagaagacaggaagacttctacccgttcctgaaggacaacagagaaaagatcgaaaagatcctgacattcagaatcccgtactacgtcggaccgctggcaagaggaaacagcagattcgcatggatgacaagaaagagcgaagaaacaatcacaccgtggaacttcgaagaagtcgtcgacaagggagcaagcgcacagagcttcatcgaaagaatgacaaacttcgacaagaacctgccgaacgaaaaggtcctgccgaagcacagcctgctgtacgaatacttcacagtctacaacgaactgacaaaggtcaagtacgtcacagaaggaatgagaaagccggcattcctgagcggagaacagaagaaggcaatcgtcgacctgctgttcaagacaaacagaaaggtcacagtcaagcagctgaaggaagactacttcaagaagatcgaatgcttcgacagcgtcgaaatcagcggagtcgaagacagattcaacgcaagcctgggaacataccacgacctgctgaagatcatcaaggacaaggacttcctggacaacgaagaaaacgaagacatcctggaagacatcgtcctgacactgacactgttcgaagacagagaaatgatcgaagaaagactgaagacatacgcacacctgttcgacgacaaggtcatgaagcagctgaagagaagaagatacacaggatggggaagactgagcagaaagctgatcaacggaatcagagacaagcagagcggaaagacaatcctggacttcctgaagagcgacggattcgcaaacagaaacttcatgcagctgatccacgacgacagcctgacattcaaggaagacatccagaaggcacaggtcagcggacagggagacagcctgcacgaacacatcgcaaacctggcaggaagcccggcaatcaagaagggaatcctgcagacagtcaaggtcgtcgacgaactggtcaaggtcatgggaagacacaagccggaaaacatcgtcatcgaaatggcaagagaaaaccagacaacacagaagggacagaagaacagcagagaaagaatgaagagaatcgaagaaggaatcaaggaactgggaagccagatcctgaaggaacacccggtcgaaaacacacagctgcagaacgaaaagctgtacctgtactacctgcagaacggaagagacatgtacgtcgaccaggaactggacatcaacagactgagcgactacgacgtcgaccacatcgtcccgcagagcttcctgaaggacgacagcatcgacaacaaggtcctgacaagaagcgacaagaacagaggaaagagcgacaacgtcccgagcgaagaagtcgtcaagaagatgaagaactactggagacagctgctgaacgcaaagctgatcacacagagaaagttcgacaacctgacaaaggcagagagaggaggactgagcgaactggacaaggcaggattcatcaagagacagctggtcgaaacaagacagatcacaaagcacgtcgcacagatcctggacagcagaatgaacacaaagtacgacgaaaacgacaagctgatcagagaagtcaaggtcatcacactgaagagcaagctggtcagcgacttcagaaaggacttccagttctacaaggtcagagaaatcaacaactaccaccacgcacacgacgcatacctgaacgcagtcgtcggaacagcactgatcaagaagtacccgaagctggaaagcgaattcgtctacggagactacaaggtctacgacgtcagaaagatgatcgcaaagagcgaacaggaaatcggaaaggcaacagcaaagtacttcttctacagcaacatcatgaacttcttcaagacagaaatcacactggcaaacggagaaatcagaaagagaccgctgatcgaaacaaacggagaaacaggagaaatcgtctgggacaagggaagagacttcgcaacagtcagaaaggtcctgagcatgccgcaggtcaacatcgtcaagaagacagaagtccagacaggaggattcagcaaggaaagcatcctgccgaagagaaacagcgacaagctgatcgcaagaaagaaggactgggacccgaagaagtacggaggattcgacagcccgacagtcgcatacagcgtcctggtcgtcgcaaaggtcgaaaagggaaagagcaagaagctgaagagcgtcaaggaactgctgggaatcacaatcatggaaagaagcagcttcgaaaagaacccgatcgacttcctggaagcaaagggatacaaggaagtcaagaaggacctgatcatcaagctgccgaagtacagcctgttcgaactggaaaacggaagaaagagaatgctggcaagcgcaggagaactgcagaagggaaacgaactggcactgccgagcaagtacgtcaacttcctgtacctggcaagccactacgaaaagctgaagggaagcccggaagacaacgaacagaagcagctgttcgtcgaacagcacaagcactacctggacgaaatcatcgaacagatcagcgaattcagcaagagagtcatcctggcagacgcaaacctggacaaggtcctgagcgcatacaacaagcacagagacaagccgatcagagaacaggcagaaaacatcatccacctgttcacactgacaaacctgggagcaccggcagcattcaagtacttcgacacaacaatcgacagaaagagatacacaagcacaaaggaagtcctggacgcaacactgatccaccagagcatcacaggactgtacgaaacaagaatcgatctgagccagctgggaggagacagcggaggaagcacaaacctgagcgacatcatcgaaaaggaaacaggaaagcagctggtcatccaggaaagcatcctgatgctgccggaagaagtcgaagaagtcatcggaaacaagccggaaagcgacatcctggtccacacagcatacgacgaaagcacagacgaaaacgtcatgctgctgacaagcgacgcaccggaatacaagccgtgggcactggtcatccaggacagcaacggagaaaacaagatcaagatgctgagcggaggaagcccgaagaagaagagaaaggtctaatagtctagacatcacatttaaaagcatctcagcctaccatgagaataagagaaagaaaatgaagatcaatagcttattcatctctttttctttttcgttggtgtaaagccaacaccctgtctaaaaaacataaatttctttaatcattttgcctcttttctctgtgcttcaattaataaaaaatggaaagaacctcgagaaaaaaaaaaaaaaaaaaaaaaaaaaaaaagcgaaaaaaaaaaaaaaaaaaaaaaaaaaaaaaccgaaaaaaaaaaaaaaaaaaaaaaaaaaaaaaaaaaaaaaat

SEQ ID NO: 352 - RNA, 5470 nt, synthetic construct
  misc_feature 1..5470: note = Synthetic
  source 1..5470: mol_type = other RNA
gggagacccaagctggctagcgtttaaacttaagctttcccgcagtcggcgtccagcggctctgcttgttcgtgtgtgtgtcgttgcaggccttattcggatccgccaccatggaagcaagcccggcaagcggaccgagacacctgatggacccgcacatcttcacaagcaacttcaacaacggaatcggaagacacaagacatacctgtgctacgaagtcgaaagactggacaacggaacaagcgtcaagatggaccagcacagaggattcctgcacaaccaggcaaagaacctgctgtgcggattctacggaagacacgcagaactgagattcctggacctggtcccgagcctgcagctggacccggcacagatctacagagtcacatggttcatcagctggagcccgtgcttcagctggggatgcgcaggagaagtcagagcatttctgcaggaaaacacacacgtcagactgagaatcttcgcagcaagaatctacgactacgacccgctgtacaaggaagcactgcagatgctgagagacgcaggagcacaggtcagcatcatgacatacgacgaattcaagcactgctgggacacattcgtcgaccaccagggatgcccgttccagccgtgggacggactggacgaacacagccaggcactgagcggaagactgagagcaatcctgcagaaccagggaaacggcggcggcggaagcgaggccgctgccaaaggcggaggaggaagcggaggaggcggcagcgacaagaagtacagcatcggactggccatcggaacaaacagcgtcggatgggcagtcatcacagacgaatacaaggtcccgagcaagaagttcaaggtcctgggaaacacagacagacacagcatcaagaagaacctgatcggagcactgctgttcgacagcggagaaacagcagaagcaacaagactgaagagaacagcaagaagaagatacacaagaagaaagaacagaatctgctacctgcaggaaatcttcagcaacgaaatggcaaaggtcgacgacagcttcttccacagactggaagaaagcttcctggtcgaagaagacaagaagcacgaaagacacccgatcttcggaaacatcgtcgacgaagtcgcataccacgaaaagtacccgacaatctaccacctgagaaagaagctggtcgacagcacagacaaggcagacctgagactgatctacctggcactggcacacatgatcaagttcagaggacacttcctgatcgaaggagacctgaacccggacaacagcgacgtcgacaagctgttcatccagctggtccagacatacaaccagctgttcgaagaaaacccgatcaacgcaagcggagtcgacgcaaaggcaatcctgagcgcaagactgagcaagagcagaagactggaaaacctgatcgcacagctgccgggagaaaagaagaacggactgttcggaaacctgatcgcactgagcctgggactgacaccgaacttcaagagcaacttcgacctggcagaagacgcaaagctgcagctgagcaaggacacatacgacgacgacctggacaacctgctggcacagatcggagaccagtacgcagacctgttcctggcagcaaagaacctgagcgacgcaatcctgctgagcgacatcctgagagtcaacacagaaatcacaaaggcaccgctgagcgcaagcatgatcaagagatacgacgaacaccaccaggacctgacactgctgaaggcactggtcagacagcagctgccggaaaagtacaaggaaatcttcttcgaccagagcaagaacggatacgcaggatacatcgacggaggagcaagccaggaagaattctacaagttcatcaagccgatcctggaaaagatggacggaacagaagaactgctggtcaagctgaacagagaagacctgctgagaaagcagagaacattcgacaacggaagcatcccgcaccagatccacctgggagaactgcacgcaatcctgagaagacaggaagacttctacccgttcctgaaggacaacagagaaaagatcgaaaagatcctgacattcagaatcccgtactacgtcggaccgctggcaagaggaaacagcagattcgcatggatgacaagaaagagcgaagaaacaatcacaccgtggaacttcgaagaagtcgtcgacaagggagcaagcgcacagagcttcatcgaaagaatgacaaacttcgacaagaacctgccgaacgaaaaggtcctgccgaagcacagcctgctgtacgaatacttcacagtctacaacgaactgacaaaggtcaagtacgtcacagaaggaatgagaaagccggcattcctgagcggagaacagaagaaggcaatcgtcgacctgctgttcaagacaaacagaaaggtcacagtcaagcagctgaaggaagactacttcaagaagatcgaatgcttcgacagcgtcgaaatcagcggagtcgaagacagattcaacgcaagcctgggaacataccacgacctgctgaagatcatcaaggacaaggacttcctggacaacgaagaaaacgaagacatcctggaagacatcgtcctgacactgacactgttcgaagacagagaaatgatcgaagaaagactgaagacatacgcacacctgttcgacgacaaggtcatgaagcagctgaagagaagaagatacacaggatggggaagactgagcagaaagctgatcaacggaatcagagacaagcagagcggaaagacaatcctggacttcctgaagagcgacggattcgcaaacagaaacttcatgcagctgatccacgacgacagcctgacattcaaggaagacatccagaaggcacaggtcagcggacagggagacagcctgcacgaacacatcgcaaacctggcaggaagcccggcaatcaagaagggaatcctgcagacagtcaaggtcgtcgacgaactggtcaaggtcatgggaagacacaagccggaaaacatcgtcatcgaaatggcaagagaaaaccagacaacacagaagggacagaagaacagcagagaaagaatgaagagaatcgaagaaggaatcaaggaactgggaagccagatcctgaaggaacacccggtcgaaaacacacagctgcagaacgaaaagctgtacctgtactacctgcagaacggaagagacatgtacgtcgaccaggaactggacatcaacagactgagcgactacgacgtcgaccacatcgtcccgcagagcttcctgaaggacgacagcatcgacaacaaggtcctgacaagaagcgacaagaacagaggaaagagcgacaacgtcccgagcgaagaagtcgtcaagaagatgaagaactactggagacagctgctgaacgcaaagctgatcacacagagaaagttcgacaacctgacaaaggcagagagaggaggactgagcgaactggacaaggcaggattcatcaagagacagctggtcgaaacaagacagatcacaaagcacgtcgcacagatcctggacagcagaatgaacacaaagtacgacgaaaacgacaagctgatcagagaagtcaaggtcatcacactgaagagcaagctggtcagcgacttcagaaaggacttccagttctacaaggtcagagaaatcaacaactaccaccacgcacacgacgcatacctgaacgcagtcgtcggaacagcactgatcaagaagtacccgaagctggaaagcgaattcgtctacggagactacaaggtctacgacgtcagaaagatgatcgcaaagagcgaacaggaaatcggaaaggcaacagcaaagtacttcttctacagcaacatcatgaacttcttcaagacagaaatcacactggcaaacggagaaatcagaaagagaccgctgatcgaaacaaacggagaaacaggagaaatcgtctgggacaagggaagagacttcgcaacagtcagaaaggtcctgagcatgccgcaggtcaacatcgtcaagaagacagaagtccagacaggaggattcagcaaggaaagcatcctgccgaagagaaacagcgacaagctgatcgcaagaaagaaggactgggacccgaagaagtacggaggattcgacagcccgacagtcgcatacagcgtcctggtcgtcgcaaaggtcgaaaagggaaagagcaagaagctgaagagcgtcaaggaactgctgggaatcacaatcatggaaagaagcagcttcgaaaagaacccgatcgacttcctggaagcaaagggatacaaggaagtcaagaaggacctgatcatcaagctgccgaagtacagcctgttcgaactggaaaacggaagaaagagaatgctggcaagcgcaggagaactgcagaagggaaacgaactggcactgccgagcaagtacgtcaacttcctgtacctggcaagccactacgaaaagctgaagggaagcccggaagacaacgaacagaagcagctgttcgtcgaacagcacaagcactacctggacgaaatcatcgaacagatcagcgaattcagcaagagagtcatcctggcagacgcaaacctggacaaggtcctgagcgcatacaacaagcacagagacaagccgatcagagaacaggcagaaaacatcatccacctgttcacactgacaaacctgggagcaccggcagcattcaagtacttcgacacaacaatcgacagaaagagatacacaagcacaaaggaagtcctggacgcaacactgatccaccagagcatcacaggactgtacgaaacaagaatcgatctgagccagctgggaggagacagcggaggaagcacaaacctgagcgacatcatcgaaaaggaaacaggaaagcagctggtcatccaggaaagcatcctgatgctgccggaagaagtcgaagaagtcatcggaaacaagccggaaagcgacatcctggtccacacagcatacgacgaaagcacagacgaaaacgtcatgctgctgacaagcgacgcaccggaatacaagccgtgggcactggtcatccaggacagcaacggagaaaacaagatcaagatgctgagcggaggaagcccgaagaagaagagaaaggtctaatagtctagacatcacatttaaaagcatctcagcctaccatgagaataagagaaagaaaatgaagatcaatagcttattcatctctttttctttttcgttggtgtaaagccaacaccctgtctaaaaaacataaatttctttaatcattttgcctcttttctctgtgcttcaattaataaaaaatggaaagaacctcgagaaaaaaaaaaaaaaaaaaaaaaaaaaaaaagcgaaaaaaaaaaaaaaaaaaaaaaaaaaaaaaccgaaaaaaaaaaaaaaaaaaaaaaaaaaaaaaaaaaaaaaat

SEQ ID NO: 353 - RNA, 5470 nt, synthetic construct
  misc_feature 1..5470: note = Synthetic
  source 1..5470: mol_type = other RNA
gggagacccaagctggctagcgtttaaacttaagctttcccgcagtcggcgtccagcggctctgcttgttcgtgtgtgtgtcgttgcaggccttattcggatccgccaccatggaagcaagcccggcaagcggaccgagacacctgatggacccgcacatcttcacaagcaacttcaacaacggaatcggaagacacaagacatacctgtgctacgaagtcgaaagactggacaacggaacaagcgtcaagatggaccagcacagaggattcctgcacaaccaggcaaagaacctgctgtgcggattctacggaagacacgcagaactgagattcctggacctggtcccgagcctgcagctggacccggcacagatctacagagtcacatggttcatcagctggagcccgtgcttcagctggggatgcgcaggagaagtcagagcatttctgcaggaaaacacacacgtcagactgagaatcttcgcagcaagaatctacgactacgacccgctgtacaaggaagcactgcagatgctgagagacgcaggagcacaggtcagcatcatgacatacgacgaattcaagcactgctgggacacattcgtcgaccaccagggatgcccgttccagccgtgggacggactggacgaacacagccaggcactgagcggaagactgagagcaatcctgcagaaccagggaaacgaggccgccgccaaggaggccgccgccaaggaggccgccgccaaggaggccgccgccaaggacaagaagtacagcatcggactggccatcggaacaaacagcgtcggatgggcagtcatcacagacgaatacaaggtcccgagcaagaagttcaaggtcctgggaaacacagacagacacagcatcaagaagaacctgatcggagcactgctgttcgacagcggagaaacagcagaagcaacaagactgaagagaacagcaagaagaagatacacaagaagaaagaacagaatctgctacctgcaggaaatcttcagcaacgaaatggcaaaggtcgacgacagcttcttccacagactggaagaaagcttcctggtcgaagaagacaagaagcacgaaagacacccgatcttcggaaacatcgtcgacgaagtcgcataccacgaaaagtacccgacaatctaccacctgagaaagaagctggtcgacagcacagacaaggcagacctgagactgatctacctggcactggcacacatgatcaagttcagaggacacttcctgatcgaaggagacctgaacccggacaacagcgacgtcgacaagctgttcatccagctggtccagacatacaaccagctgttcgaagaaaacccgatcaacgcaagcggagtcgacgcaaaggcaatcctgagcgcaagactgagcaagagcagaagactggaaaacctgatcgcacagctgccgggagaaaagaagaacggactgttcggaaacctgatcgcactgagcctgggactgacaccgaacttcaagagcaacttcgacctggcagaagacgcaaagctgcagctgagcaaggacacatacgacgacgacctggacaacctgctggcacagatcggagaccagtacgcagacctgttcctggcagcaaagaacctgagcgacgcaatcctgctgagcgacatcctgagagtcaacacagaaatcacaaaggcaccgctgagcgcaagcatgatcaagagatacgacgaacaccaccaggacctgacactgctgaaggcactggtcagacagcagctgccggaaaagtacaaggaaatcttcttcgaccagagcaagaacggatacgcaggatacatcgacggaggagcaagccaggaagaattctacaagttcatcaagccgatcctggaaaagatggacggaacagaagaactgctggtcaagctgaacagagaagacctgctgagaaagcagagaacattcgacaacggaagcatcccgcaccagatccacctgggagaactgcacgcaatcctgagaagacaggaagacttctacccgttcctgaaggacaacagagaaaagatcgaaaagatcctgacattcagaatcccgtactacgtcggaccgctggcaagaggaaacagcagattcgcatggatgacaagaaagagcgaagaaacaatcacaccgtggaacttcgaagaagtcgtcgacaagggagcaagcgcacagagcttcatcgaaagaatgacaaacttcgacaagaacctgccgaacgaaaaggtcctgccgaagcacagcctgctgtacgaatacttcacagtctacaacgaactgacaaaggtcaagtacgtcacagaaggaatgagaaagccggcattcctgagcggagaacagaagaaggcaatcgtcgacctgctgttcaagacaaacagaaaggtcacagtcaagcagctgaaggaagactacttcaagaagatcgaatgcttcgacagcgtcgaaatcagcggagtcgaagacagattcaacgcaagcctgggaacataccacgacctgctgaagatcatcaaggacaaggacttcctggacaacgaagaaaacgaagacatcctggaagacatcgtcctgacactgacactgttcgaagacagagaaatgatcgaagaaagactgaagacatacgcacacctgttcgacgacaaggtcatgaagcagctgaagagaagaagatacacaggatggggaagactgagcagaaagctgatcaacggaatcagagacaagcagagcggaaagacaatcctggacttcctgaagagcgacggattcgcaaacagaaacttcatgcagctgatccacgacgacagcctgacattcaaggaagacatccagaaggcacaggtcagcggacagggagacagcctgcacgaacacatcgcaaacctggcaggaagcccggcaatcaagaagggaatcctgcagacagtcaaggtcgtcgacgaactggtcaaggtcatgggaagacacaagccggaaaacatcgtcatcgaaatggcaagagaaaaccagacaacacagaagggacagaagaacagcagagaaagaatgaagagaatcgaagaaggaatcaaggaactgggaagccagatcctgaaggaacacccggtcgaaaacacacagctgcagaacgaaaagctgtacctgtactacctgcagaacggaagagacatgtacgtcgaccaggaactggacatcaacagactgagcgactacgacgtcgaccacatcgtcccgcagagcttcctgaaggacgacagcatcgacaacaaggtcctgacaagaagcgacaagaacagaggaaagagcgacaacgtcccgagcgaagaagtcgtcaagaagatgaagaactactggagacagctgctgaacgcaaagctgatcacacagagaaagttcgacaacctgacaaaggcagagagaggaggactgagcgaactggacaaggcaggattcatcaagagacagctggtcgaaacaagacagatcacaaagcacgtcgcacagatcctggacagcagaatgaacacaaagtacgacgaaaacgacaagctgatcagagaagtcaaggtcatcacactgaagagcaagctggtcagcgacttcagaaaggacttccagttctacaaggtcagagaaatcaacaactaccaccacgcacacgacgcatacctgaacgcagtcgtcggaacagcactgatcaagaagtacccgaagctggaaagcgaattcgtctacggagactacaaggtctacgacgtcagaaagatgatcgcaaagagcgaacaggaaatcggaaaggcaacagcaaagtacttcttctacagcaacatcatgaacttcttcaagacagaaatcacactggcaaacggagaaatcagaaagagaccgctgatcgaaacaaacggagaaacaggagaaatcgtctgggacaagggaagagacttcgcaacagtcagaaaggtcctgagcatgccgcaggtcaacatcgtcaagaagacagaagtccagacaggaggattcagcaaggaaagcatcctgccgaagagaaacagcgacaagctgatcgcaagaaagaaggactgggacccgaagaagtacggaggattcgacagcccgacagtcgcatacagcgtcctggtcgtcgcaaaggtcgaaaagggaaagagcaagaagctgaagagcgtcaaggaactgctgggaatcacaatcatggaaagaagcagcttcgaaaagaacccgatcgacttcctggaagcaaagggatacaaggaagtcaagaaggacctgatcatcaagctgccgaagtacagcctgttcgaactggaaaacggaagaaagagaatgctggcaagcgcaggagaactgcagaagggaaacgaactggcactgccgagcaagtacgtcaacttcctgtacctggcaagccactacgaaaagctgaagggaagcccggaagacaacgaacagaagcagctgttcgtcgaacagcacaagcactacctggacgaaatcatcgaacagatcagcgaattcagcaagagagtcatcctggcagacgcaaacctggacaaggtcctgagcgcatacaacaagcacagagacaagccgatcagagaacaggcagaaaacatcatccacctgttcacactgacaaacctgggagcaccggcagcattcaagtacttcgacacaacaatcgacagaaagagatacacaagcacaaaggaagtcctggacgcaacactgatccaccagagcatcacaggactgtacgaaacaagaatcgatctgagccagctgggaggagacagcggaggaagcacaaacctgagcgacatcatcgaaaaggaaacaggaaagcagctggtcatccaggaaagcatcctgatgctgccggaagaagtcgaagaagtcatcggaaacaagccggaaagcgacatcctggtccacacagcatacgacgaaagcacagacgaaaacgtcatgctgctgacaagcgacgcaccggaatacaagccgtgggcactggtcatccaggacagcaacggagaaaacaagatcaagatgctgagcggaggaagcccgaagaagaagagaaaggtctaatagtctagacatcacatttaaaagcatctcagcctaccatgagaataagagaaagaaaatgaagatcaatagcttattcatctctttttctttttcgttggtgtaaagccaacaccctgtctaaaaaacataaatttctttaatcattttgcctcttttctctgtgcttcaattaataaaaaatggaaagaacctcgagaaaaaaaaaaaaaaaaaaaaaaaaaaaaaagcgaaaaaaaaaaaaaaaaaaaaaaaaaaaaaaccgaaaaaaaaaaaaaaaaaaaaaaaaaaaaaaaaaaaaaaat

SEQ ID NO: 354 - RNA, 5485 nt, synthetic construct
  misc_feature 1..5485: note = Synthetic
  source 1..5485: mol_type = other RNA
gggagacccaagctggctagcgtttaaacttaagctttcccgcagtcggcgtccagcggctctgcttgttcgtgtgtgtgtcgttgcaggccttattcggatccgccaccatggaagcaagcccggcaagcggaccgagacacctgatggacccgcacatcttcacaagcaacttcaacaacggaatcggaagacacaagacatacctgtgctacgaagtcgaaagactggacaacggaacaagcgtcaagatggaccagcacagaggattcctgcacaaccaggcaaagaacctgctgtgcggattctacggaagacacgcagaactgagattcctggacctggtcccgagcctgcagctggacccggcacagatctacagagtcacatggttcatcagctggagcccgtgcttcagctggggatgcgcaggagaagtcagagcatttctgcaggaaaacacacacgtcagactgagaatcttcgcagcaagaatctacgactacgacccgctgtacaaggaagcactgcagatgctgagagacgcaggagcacaggtcagcatcatgacatacgacgaattcaagcactgctgggacacattcgtcgaccaccagggatgcccgttccagccgtgggacggactggacgaacacagccaggcactgagcggaagactgagagcaatcctgcagaaccagggaaacggaggaggaggaagcgaagccgccgccaaagaggccgccgccaagggaggcggcggcagcgaggccgccgccaaggacaagaagtacagcatcggactggccatcggaacaaacagcgtcggatgggcagtcatcacagacgaatacaaggtcccgagcaagaagttcaaggtcctgggaaacacagacagacacagcatcaagaagaacctgatcggagcactgctgttcgacagcggagaaacagcagaagcaacaagactgaagagaacagcaagaagaagatacacaagaagaaagaacagaatctgctacctgcaggaaatcttcagcaacgaaatggcaaaggtcgacgacagcttcttccacagactggaagaaagcttcctggtcgaagaagacaagaagcacgaaagacacccgatcttcggaaacatcgtcgacgaagtcgcataccacgaaaagtacccgacaatctaccacctgagaaagaagctggtcgacagcacagacaaggcagacctgagactgatctacctggcactggcacacatgatcaagttcagaggacacttcctgatcgaaggagacctgaacccggacaacagcgacgtcgacaagctgttcatccagctggtccagacatacaaccagctgttcgaagaaaacccgatcaacgcaagcggagtcgacgcaaaggcaatcctgagcgcaagactgagcaagagcagaagactggaaaacctgatcgcacagctgccgggagaaaagaagaacggactgttcggaaacctgatcgcactgagcctgggactgacaccgaacttcaagagcaacttcgacctggcagaagacgcaaagctgcagctgagcaaggacacatacgacgacgacctggacaacctgctggcacagatcggagaccagtacgcagacctgttcctggcagcaaagaacctgagcgacgcaatcctgctgagcgacatcctgagagtcaacacagaaatcacaaaggcaccgctgagcgcaagcatgatcaagagatacgacgaacaccaccaggacctgacactgctgaaggcactggtcagacagcagctgccggaaaagtacaaggaaatcttcttcgaccagagcaagaacggatacgcaggatacatcgacggaggagcaagccaggaagaattctacaagttcatcaagccgatcctggaaaagatggacggaacagaagaactgctggtcaagctgaacagagaagacctgctgagaaagcagagaacattcgacaacggaagcatcccgcaccagatccacctgggagaactgcacgcaatcctgagaagacaggaagacttctacccgttcctgaaggacaacagagaaaagatcgaaaagatcctgacattcagaatcccgtactacgtcggaccgctggcaagaggaaacagcagattcgcatggatgacaagaaagagcgaagaaacaatcacaccgtggaacttcgaagaagtcgtcgacaagggagcaagcgcacagagcttcatcgaaagaatgacaaacttcgacaagaacctgccgaacgaaaaggtcctgccgaagcacagcctgctgtacgaatacttcacagtctacaacgaactgacaaaggtcaagtacgtcacagaaggaatgagaaagccggcattcctgagcggagaacagaagaaggcaatcgtcgacctgctgttcaagacaaacagaaaggtcacagtcaagcagctgaaggaagactacttcaagaagatcgaatgcttcgacagcgtcgaaatcagcggagtcgaagacagattcaacgcaagcctgggaacataccacgacctgctgaagatcatcaaggacaaggacttcctggacaacgaagaaaacgaagacatcctggaagacatcgtcctgacactgacactgttcgaagacagagaaatgatcgaagaaagactgaagacatacgcacacctgttcgacgacaaggtcatgaagcagctgaagagaagaagatacacaggatggggaagactgagcagaaagctgatcaacggaatcagagacaagcagagcggaaagacaatcctggacttcctgaagagcgacggattcgcaaacagaaacttcatgcagctgatccacgacgacagcctgacattcaaggaagacatccagaaggcacaggtcagcggacagggagacagcctgcacgaacacatcgcaaacctggcaggaagcccggcaatcaagaagggaatcctgcagacagtcaaggtcgtcgacgaactggtcaaggtcatgggaagacacaagccggaaaacatcgtcatcgaaatggcaagagaaaaccagacaacacagaagggacagaagaacagcagagaaagaatgaagagaatcgaagaaggaatcaaggaactgggaagccagatcctgaaggaacacccggtcgaaaacacacagctgcagaacgaaaagctgtacctgtactacctgcagaacggaagagacatgtacgtcgaccaggaactggacatcaacagactgagcgactacgacgtcgaccacatcgtcccgcagagcttcctgaaggacgacagcatcgacaacaaggtcctgacaagaagcgacaagaacagaggaaagagcgacaacgtcccgagcgaagaagtcgtcaagaagatgaagaactactggagacagctgctgaacgcaaagctgatcacacagagaaagttcgacaacctgacaaaggcagagagaggaggactgagcgaactggacaaggcaggattcatcaagagacagctggtcgaaacaagacagatcacaaagcacgtcgcacagatcctggacagcagaatgaacacaaagtacgacgaaaacgacaagctgatcagagaagtcaaggtcatcacactgaagagcaagctggtcagcgacttcagaaaggacttccagttctacaaggtcagagaaatcaacaactaccaccacgcacacgacgcatacctgaacgcagtcgtcggaacagcactgatcaagaagtacccgaagctggaaagcgaattcgtctacggagactacaaggtctacgacgtcagaaagatgatcgcaaagagcgaacaggaaatcggaaaggcaacagcaaagtacttcttctacagcaacatcatgaacttcttcaagacagaaatcacactggcaaacggagaaatcagaaagagaccgctgatcgaaacaaacggagaaacaggagaaatcgtctgggacaagggaagagacttcgcaacagtcagaaaggtcctgagcatgccgcaggtcaacatcgtcaagaagacagaagtccagacaggaggattcagcaaggaaagcatcctgccgaagagaaacagcgacaagctgatcgcaagaaagaaggactgggacccgaagaagtacggaggattcgacagcccgacagtcgcatacagcgtcctggtcgtcgcaaaggtcgaaaagggaaagagcaagaagctgaagagcgtcaaggaactgctgggaatcacaatcatggaaagaagcagcttcgaaaagaacccgatcgacttcctggaagcaaagggatacaaggaagtcaagaaggacctgatcatcaagctgccgaagtacagcctgttcgaactggaaaacggaagaaagagaatgctggcaagcgcaggagaactgcagaagggaaacgaactggcactgccgagcaagtacgtcaacttcctgtacctggcaagccactacgaaaagctgaagggaagcccggaagacaacgaacagaagcagctgttcgtcgaacagcacaagcactacctggacgaaatcatcgaacagatcagcgaattcagcaagagagtcatcctggcagacgcaaacctggacaaggtcctgagcgcatacaacaagcacagagacaagccgatcagagaacaggcagaaaacatcatccacctgttcacactgacaaacctgggagcaccggcagcattcaagtacttcgacacaacaatcgacagaaagagatacacaagcacaaaggaagtcctggacgcaacactgatccaccagagcatcacaggactgtacgaaacaagaatcgatctgagccagctgggaggagacagcggaggaagcacaaacctgagcgacatcatcgaaaaggaaacaggaaagcagctggtcatccaggaaagcatcctgatgctgccggaagaagtcgaagaagtcatcggaaacaagccggaaagcgacatcctggtccacacagcatacgacgaaagcacagacgaaaacgtcatgctgctgacaagcgacgcaccggaatacaagccgtgggcactggtcatccaggacagcaacggagaaaacaagatcaagatgctgagcggaggaagcccgaagaagaagagaaaggtctaatagtctagacatcacatttaaaagcatctcagcctaccatgagaataagagaaagaaaatgaagatcaatagcttattcatctctttttctttttcgttggtgtaaagccaacaccctgtctaaaaaacataaatttctttaatcattttgcctcttttctctgtgcttcaattaataaaaaatggaaagaacctcgagaaaaaaaaaaaaaaaaaaaaaaaaaaaaaagcgaaaaaaaaaaaaaaaaaaaaaaaaaaaaaaccgaaaaaaaaaaaaaaaaaaaaaaaaaaaaaaaaaaaaaaat

SEQ ID NO: 355 - RNA, 5485 nt, synthetic construct
  misc_feature 1..5485: note = Synthetic
  source 1..5485: mol_type = other RNA
gggagacccaagctggctagcgtttaaacttaagctttcccgcagtcggcgtccagcggctctgcttgttcgtgtgtgtgtcgttgcaggccttattcggatccgccaccatggaagcaagcccggcaagcggaccgagacacctgatggacccgcacatcttcacaagcaacttcaacaacggaatcggaagacacaagacatacctgtgctacgaagtcgaaagactggacaacggaacaagcgtcaagatggaccagcacagaggattcctgcacaaccaggcaaagaacctgctgtgcggattctacggaagacacgcagaactgagattcctggacctggtcccgagcctgcagctggacccggcacagatctacagagtcacatggttcatcagctggagcccgtgcttcagctggggatgcgcaggagaagtcagagcatttctgcaggaaaacacacacgtcagactgagaatcttcgcagcaagaatctacgactacgacccgctgtacaaggaagcactgcagatgctgagagacgcaggagcacaggtcagcatcatgacatacgacgaattcaagcactgctgggacacattcgtcgaccaccagggatgcccgttccagccgtgggacggactggacgaacacagccaggcactgagcggaagactgagagcaatcctgcagaaccagggaaacgaggccgccgccaaggaggccgccgccaagggcggcggcggcagcggcggcggcggcagcggcggcggcggcagcgacaagaagtacagcatcggactggccatcggaacaaacagcgtcggatgggcagtcatcacagacgaatacaaggtcccgagcaagaagttcaaggtcctgggaaacacagacagacacagcatcaagaagaacctgatcggagcactgctgttcgacagcggagaaacagcagaagcaacaagactgaagagaacagcaagaagaagatacacaagaagaaagaacagaatctgctacctgcaggaaatcttcagcaacgaaatggcaaaggtcgacgacagcttcttccacagactggaagaaagcttcctggtcgaagaagacaagaagcacgaaagacacccgatcttcggaaacatcgtcgacgaagtcgcataccacgaaaagtacccgacaatctaccacctgagaaagaagctggtcgacagcacagacaaggcagacctgagactgatctacctggcactggcacacatgatcaagttcagaggacacttcctgatcgaaggagacctgaacccggacaacagcgacgtcgacaagctgttcatccagctggtccagacatacaaccagctgttcgaagaaaacccgatcaacgcaagcggagtcgacgcaaaggcaatcctgagcgcaagactgagcaagagcagaagactggaaaacctgatcgcacagctgccgggagaaaagaagaacggactgttcggaaacctgatcgcactgagcctgggactgacaccgaacttcaagagcaacttcgacctggcagaagacgcaaagctgcagctgagcaaggacacatacgacgacgacctggacaacctgctggcacagatcggagaccagtacgcagacctgttcctggcagcaaagaacctgagcgacgcaatcctgctgagcgacatcctgagagtcaacacagaaatcacaaaggcaccgctgagcgcaagcatgatcaagagatacgacgaacaccaccaggacctgacactgctgaaggcactggtcagacagcagctgccggaaaagtacaaggaaatcttcttcgaccagagcaagaacggatacgcaggatacatcgacggaggagcaagccaggaagaattctacaagttcatcaagccgatcctggaaaagatggacggaacagaagaactgctggtcaagctgaacagagaagacctgctgagaaagcagagaacattcgacaacggaagcatcccgcaccagatccacctgggagaactgcacgcaatcctgagaagacaggaagacttctacccgttcctgaaggacaacagagaaaagatcgaaaagatcctgacattcagaatcccgtactacgtcggaccgctggcaagaggaaacagcagattcgcatggatgacaagaaagagcgaagaaacaatcacaccgtggaacttcgaagaagtcgtcgacaagggagcaagcgcacagagcttcatcgaaagaatgacaaacttcgacaagaacctgccgaacgaaaaggtcctgccgaagcacagcctgctgtacgaatacttcacagtctacaacgaactgacaaaggtcaagtacgtcacagaaggaatgagaaagccggcattcctgagcggagaacagaagaaggcaatcgtcgacctgctgttcaagacaaacagaaaggtcacagtcaagcagctgaaggaagactacttcaagaagatcgaatgcttcgacagcgtcgaaatcagcggagtcgaagacagattcaacgcaagcctgggaacataccacgacctgctgaagatcatcaaggacaaggacttcctggacaacgaagaaaacgaagacatcctggaagacatcgtcctgacactgacactgttcgaagacagagaaatgatcgaagaaagactgaagacatacgcacacctgttcgacgacaaggtcatgaagcagctgaagagaagaagatacacaggatggggaagactgagcagaaagctgatcaacggaatcagagacaagcagagcggaaagacaatcctggacttcctgaagagcgacggattcgcaaacagaaacttcatgcagctgatccacgacgacagcctgacattcaaggaagacatccagaaggcacaggtcagcggacagggagacagcctgcacgaacacatcgcaaacctggcaggaagcccggcaatcaagaagggaatcctgcagacagtcaaggtcgtcgacgaactggtcaaggtcatgggaagacacaagccggaaaacatcgtcatcgaaatggcaagagaaaaccagacaacacagaagggacagaagaacagcagagaaagaatgaagagaatcgaagaaggaatcaaggaactgggaagccagatcctgaaggaacacccggtcgaaaacacacagctgcagaacgaaaagctgtacctgtactacctgcagaacggaagagacatgtacgtcgaccaggaactggacatcaacagactgagcgactacgacgtcgaccacatcgtcccgcagagcttcctgaaggacgacagcatcgacaacaaggtcctgacaagaagcgacaagaacagaggaaagagcgacaacgtcccgagcgaagaagtcgtcaagaagatgaagaactactggagacagctgctgaacgcaaagctgatcacacagagaaagttcgacaacctgacaaaggcagagagaggaggactgagcgaactggacaaggcaggattcatcaagagacagctggtcgaaacaagacagatcacaaagcacgtcgcacagatcctggacagcagaatgaacacaaagtacgacgaaaacgacaagctgatcagagaagtcaaggtcatcacactgaagagcaagctggtcagcgacttcagaaaggacttccagttctacaaggtcagagaaatcaacaactaccaccacgcacacgacgcatacctgaacgcagtcgtcggaacagcactgatcaagaagtacccgaagctggaaagcgaattcgtctacggagactacaaggtctacgacgtcagaaagatgatcgcaaagagcgaacaggaaatcggaaaggcaacagcaaagtacttcttctacagcaacatcatgaacttcttcaagacagaaatcacactggcaaacggagaaatcagaaagagaccgctgatcgaaacaaacggagaaacaggagaaatcgtctgggacaagggaagagacttcgcaacagtcagaaaggtcctgagcatgccgcaggtcaacatcgtcaagaagacagaagtccagacaggaggattcagcaaggaaagcatcctgccgaagagaaacagcgacaagctgatcgcaagaaagaaggactgggacccgaagaagtacggaggattcgacagcccgacagtcgcatacagcgtcctggtcgtcgcaaaggtcgaaaagggaaagagcaagaagctgaagagcgtcaaggaactgctgggaatcacaatcatggaaagaagcagcttcgaaaagaacccgatcgacttcctggaagcaaagggatacaaggaagtcaagaaggacctgatcatcaagctgccgaagtacagcctgttcgaactggaaaacggaagaaagagaatgctggcaagcgcaggagaactgcagaagggaaacgaactggcactgccgagcaagtacgtcaacttcctgtacctggcaagccactacgaaaagctgaagggaagcccggaagacaacgaacagaagcagctgttcgtcgaacagcacaagcactacctggacgaaatcatcgaacagatcagcgaattcagcaagagagtcatcctggcagacgcaaacctggacaaggtcctgagcgcatacaacaagcacagagacaagccgatcagagaacaggcagaaaacatcatccacctgttcacactgacaaacctgggagcaccggcagcattcaagtacttcgacacaacaatcgacagaaagagatacacaagcacaaaggaagtcctggacgcaacactgatccaccagagcatcacaggactgtacgaaacaagaatcgatctgagccagctgggaggagacagcggaggaagcacaaacctgagcgacatcatcgaaaaggaaacaggaaagcagctggtcatccaggaaagcatcctgatgctgccggaagaagtcgaagaagtcatcggaaacaagccggaaagcgacatcctggtccacacagcatacgacgaaagcacagacgaaaacgtcatgctgctgacaagcgacgcaccggaatacaagccgtgggcactggtcatccaggacagcaacggagaaaacaagatcaagatgctgagcggaggaagcccgaagaagaagagaaaggtctaatagtctagacatcacatttaaaagcatctcagcctaccatgagaataagagaaagaaaatgaagatcaatagcttattcatctctttttctttttcgttggtgtaaagccaacaccctgtctaaaaaacataaatttctttaatcattttgcctcttttctctgtgcttcaattaataaaaaatggaaagaacctcgagaaaaaaaaaaaaaaaaaaaaaaaaaaaaaagcgaaaaaaaaaaaaaaaaaaaaaaaaaaaaaaccgaaaaaaaaaaaaaaaaaaaaaaaaaaaaaaaaaaaaaaat

SEQ ID NO: 356 - RNA, 5485 nt, synthetic construct
  misc_feature 1..5485: note = Synthetic
  source 1..5485: mol_type = other RNA
gggagacccaagctggctagcgtttaaacttaagctttcccgcagtcggcgtccagcggctctgcttgttcgtgtgtgtgtcgttgcaggccttattcggatccgccaccatggaagcaagcccggcaagcggaccgagacacctgatggacccgcacatcttcacaagcaacttcaacaacggaatcggaagacacaagacatacctgtgctacgaagtcgaaagactggacaacggaacaagcgtcaagatggaccagcacagaggattcctgcacaaccaggcaaagaacctgctgtgcggattctacggaagacacgcagaactgagattcctggacctggtcccgagcctgcagctggacccggcacagatctacagagtcacatggttcatcagctggagcccgtgcttcagctggggatgcgcaggagaagtcagagcatttctgcaggaaaacacacacgtcagactgagaatcttcgcagcaagaatctacgactacgacccgctgtacaaggaagcactgcagatgctgagagacgcaggagcacaggtcagcatcatgacatacgacgaattcaagcactgctgggacacattcgtcgaccaccagggatgcccgttccagccgtgggacggactggacgaacacagccaggcactgagcggaagactgagagcaatcctgcagaaccagggaaacgaagcagcagcaaaggaagcagcagcaaagggaggaggaggaagcggaggaggaggaagcgaagcagcagcaaaggacaagaagtacagcatcggactggccatcggaacaaacagcgtcggatgggcagtcatcacagacgaatacaaggtcccgagcaagaagttcaaggtcctgggaaacacagacagacacagcatcaagaagaacctgatcggagcactgctgttcgacagcggagaaacagcagaagcaacaagactgaagagaacagcaagaagaagatacacaagaagaaagaacagaatctgctacctgcaggaaatcttcagcaacgaaatggcaaaggtcgacgacagcttcttccacagactggaagaaagcttcctggtcgaagaagacaagaagcacgaaagacacccgatcttcggaaacatcgtcgacgaagtcgcataccacgaaaagtacccgacaatctaccacctgagaaagaagctggtcgacagcacagacaaggcagacctgagactgatctacctggcactggcacacatgatcaagttcagaggacacttcctgatcgaaggagacctgaacccggacaacagcgacgtcgacaagctgttcatccagctggtccagacatacaaccagctgttcgaagaaaacccgatcaacgcaagcggagtcgacgcaaaggcaatcctgagcgcaagactgagcaagagcagaagactggaaaacctgatcgcacagctgccgggagaaaagaagaacggactgttcggaaacctgatcgcactgagcctgggactgacaccgaacttcaagagcaacttcgacctggcagaagacgcaaagctgcagctgagcaaggacacatacgacgacgacctggacaacctgctggcacagatcggagaccagtacgcagacctgttcctggcagcaaagaacctgagcgacgcaatcctgctgagcgacatcctgagagtcaacacagaaatcacaaaggcaccgctgagcgcaagcatgatcaagagatacgacgaacaccaccaggacctgacactgctgaaggcactggtcagacagcagctgccggaaaagtacaaggaaatcttcttcgaccagagcaagaacggatacgcaggatacatcgacggaggagcaagccaggaagaattctacaagttcatcaagccgatcctggaaaagatggacggaacagaagaactgctggtcaagctgaacagagaagacctgctgagaaagcagagaacattcgacaacggaagcatcccgcaccagatccacctgggagaactgcacgcaatcctgagaagacaggaagacttctacccgttcctgaaggacaacagagaaaagatcgaaaagatcctgacattcagaatcccgtactacgtcggaccgctggcaagaggaaacagcagattcgcatggatgacaagaaagagcgaagaaacaatcacaccgtggaacttcgaagaagtcgtcgacaagggagcaagcgcacagagcttcatcgaaagaatgacaaacttcgacaagaacctgccgaacgaaaaggtcctgccgaagcacagcctgctgtacgaatacttcacagtctacaacgaactgacaaaggtcaagtacgtcacagaaggaatgagaaagccggcattcctgagcggagaacagaagaaggcaatcgtcgacctgctgttcaagacaaacagaaaggtcacagtcaagcagctgaaggaagactacttcaagaagatcgaatgcttcgacagcgtcgaaatcagcggagtcgaagacagattcaacgcaagcctgggaacataccacgacctgctgaagatcatcaaggacaaggacttcctggacaacgaagaaaacgaagacatcctggaagacatcgtcctgacactgacactgttcgaagacagagaaatgatcgaagaaagactgaagacatacgcacacctgttcgacgacaaggtcatgaagcagctgaagagaagaagatacacaggatggggaagactgagcagaaagctgatcaacggaatcagagacaagcagagcggaaagacaatcctggacttcctgaagagcgacggattcgcaaacagaaacttcatgcagctgatccacgacgacagcctgacattcaaggaagacatccagaaggcacaggtcagcggacagggagacagcctgcacgaacacatcgcaaacctggcaggaagcccggcaatcaagaagggaatcctgcagacagtcaaggtcgtcgacgaactggtcaaggtcatgggaagacacaagccggaaaacatcgtcatcgaaatggcaagagaaaaccagacaacacagaagggacagaagaacagcagagaaagaatgaagagaatcgaagaaggaatcaaggaactgggaagccagatcctgaaggaacacccggtcgaaaacacacagctgcagaacgaaaagctgtacctgtactacctgcagaacggaagagacatgtacgtcgaccaggaactggacatcaacagactgagcgactacgacgtcgaccacatcgtcccgcagagcttcctgaaggacgacagcatcgacaacaaggtcctgacaagaagcgacaagaacagaggaaagagcgacaacgtcccgagcgaagaagtcgtcaagaagatgaagaactactggagacagctgctgaacgcaaagctgatcacacagagaaagttcgacaacctgacaaaggcagagagaggaggactgagcgaactggacaaggcaggattcatcaagagacagctggtcgaaacaagacagatcacaaagcacgtcgcacagatcctggacagcagaatgaacacaaagtacgacgaaaacgacaagctgatcagagaagtcaaggtcatcacactgaagagcaagctggtcagcgacttcagaaaggacttccagttctacaaggtcagagaaatcaacaactaccaccacgcacacgacgcatacctgaacgcagtcgtcggaacagcactgatcaagaagtacccgaagctggaaagcgaattcgtctacggagactacaaggtctacgacgtcagaaagatgatcgcaaagagcgaacaggaaatcggaaaggcaacagcaaagtacttcttctacagcaacatcatgaacttcttcaagacagaaatcacactggcaaacggagaaatcagaaagagaccgctgatcgaaacaaacggagaaacaggagaaatcgtctgggacaagggaagagacttcgcaacagtcagaaaggtcctgagcatgccgcaggtcaacatcgtcaagaagacagaagtccagacaggaggattcagcaaggaaagcatcctgccgaagagaaacagcgacaagctgatcgcaagaaagaaggactgggacccgaagaagtacggaggattcgacagcccgacagtcgcatacagcgtcctggtcgtcgcaaaggtcgaaaagggaaagagcaagaagctgaagagcgtcaaggaactgctgggaatcacaatcatggaaagaagcagcttcgaaaagaacccgatcgacttcctggaagcaaagggatacaaggaagtcaagaaggacctgatcatcaagctgccgaagtacagcctgttcgaactggaaaacggaagaaagagaatgctggcaagcgcaggagaactgcagaagggaaacgaactggcactgccgagcaagtacgtcaacttcctgtacctggcaagccactacgaaaagctgaagggaagcccggaagacaacgaacagaagcagctgttcgtcgaacagcacaagcactacctggacgaaatcatcgaacagatcagcgaattcagcaagagagtcatcctggcagacgcaaacctggacaaggtcctgagcgcatacaacaagcacagagacaagccgatcagagaacaggcagaaaacatcatccacctgttcacactgacaaacctgggagcaccggcagcattcaagtacttcgacacaacaatcgacagaaagagatacacaagcacaaaggaagtcctggacgcaacactgatccaccagagcatcacaggactgtacgaaacaagaatcgatctgagccagctgggaggagacagcggaggaagcacaaacctgagcgacatcatcgaaaaggaaacaggaaagcagctggtcatccaggaaagcatcctgatgctgccggaagaagtcgaagaagtcatcggaaacaagccggaaagcgacatcctggtccacacagcatacgacgaaagcacagacgaaaacgtcatgctgctgacaagcgacgcaccggaatacaagccgtgggcactggtcatccaggacagcaacggagaaaacaagatcaagatgctgagcggaggaagcccgaagaagaagagaaaggtctaatagtctagacatcacatttaaaagcatctcagcctaccatgagaataagagaaagaaaatgaagatcaatagcttattcatctctttttctttttcgttggtgtaaagccaacaccctgtctaaaaaacataaatttctttaatcattttgcctcttttctctgtgcttcaattaataaaaaatggaaagaacctcgagaaaaaaaaaaaaaaaaaaaaaaaaaaaaaagcgaaaaaaaaaaaaaaaaaaaaaaaaaaaaaaccgaaaaaaaaaaaaaaaaaaaaaaaaaaaaaaaaaaaaaaat

SEQ ID NO: 357 - RNA, 5485 nt, synthetic construct
  misc_feature 1..5485: note = Synthetic
  source 1..5485: mol_type = other RNA
gggagacccaagctggctagcgtttaaacttaagctttcccgcagtcggcgtccagcggctctgcttgttcgtgtgtgtgtcgttgcaggccttattcggatccgccaccatggaagcaagcccggcaagcggaccgagacacctgatggacccgcacatcttcacaagcaacttcaacaacggaatcggaagacacaagacatacctgtgctacgaagtcgaaagactggacaacggaacaagcgtcaagatggaccagcacagaggattcctgcacaaccaggcaaagaacctgctgtgcggattctacggaagacacgcagaactgagattcctggacctggtcccgagcctgcagctggacccggcacagatctacagagtcacatggttcatcagctggagcccgtgcttcagctggggatgcgcaggagaagtcagagcatttctgcaggaaaacacacacgtcagactgagaatcttcgcagcaagaatctacgactacgacccgctgtacaaggaagcactgcagatgctgagagacgcaggagcacaggtcagcatcatgacatacgacgaattcaagcactgctgggacacattcgtcgaccaccagggatgcccgttccagccgtgggacggactggacgaacacagccaggcactgagcggaagactgagagcaatcctgcagaaccagggaaacgaagcagcagcaaaggaagcagcagcaaaggaagcagcagcaaagggaggaggaggaagcggaggaggaggaagcgacaagaagtacagcatcggactggccatcggaacaaacagcgtcggatgggcagtcatcacagacgaatacaaggtcccgagcaagaagttcaaggtcctgggaaacacagacagacacagcatcaagaagaacctgatcggagcactgctgttcgacagcggagaaacagcagaagcaacaagactgaagagaacagcaagaagaagatacacaagaagaaagaacagaatctgctacctgcaggaaatcttcagcaacgaaatggcaaaggtcgacgacagcttcttccacagactggaagaaagcttcctggtcgaagaagacaagaagcacgaaagacacccgatcttcggaaacatcgtcgacgaagtcgcataccacgaaaagtacccgacaatctaccacctgagaaagaagctggtcgacagcacagacaaggcagacctgagactgatctacctggcactggcacacatgatcaagttcagaggacacttcctgatcgaaggagacctgaacccggacaacagcgacgtcgacaagctgttcatccagctggtccagacatacaaccagctgttcgaagaaaacccgatcaacgcaagcggagtcgacgcaaaggcaatcctgagcgcaagactgagcaagagcagaagactggaaaacctgatcgcacagctgccgggagaaaagaagaacggactgttcggaaacctgatcgcactgagcctgggactgacaccgaacttcaagagcaacttcgacctggcagaagacgcaaagctgcagctgagcaaggacacatacgacgacgacctggacaacctgctggcacagatcggagaccagtacgcagacctgttcctggcagcaaagaacctgagcgacgcaatcctgctgagcgacatcctgagagtcaacacagaaatcacaaaggcaccgctgagcgcaagcatgatcaagagatacgacgaacaccaccaggacctgacactgctgaaggcactggtcagacagcagctgccggaaaagtacaaggaaatcttcttcgaccagagcaagaacggatacgcaggatacatcgacggaggagcaagccaggaagaattctacaagttcatcaagccgatcctggaaaagatggacggaacagaagaactgctggtcaagctgaacagagaagacctgctgagaaagcagagaacattcgacaacggaagcatcccgcaccagatccacctgggagaactgcacgcaatcctgagaagacaggaagacttctacccgttcctgaaggacaacagagaaaagatcgaaaagatcctgacattcagaatcccgtactacgtcggaccgctggcaagaggaaacagcagattcgcatggatgacaagaaagagcgaagaaacaatcacaccgtggaacttcgaagaagtcgtcgacaagggagcaagcgcacagagcttcatcgaaagaatgacaaacttcgacaagaacctgccgaacgaaaaggtcctgccgaagcacagcctgctgtacgaatacttcacagtctacaacgaactgacaaaggtcaagtacgtcacagaaggaatgagaaagccggcattcctgagcggagaacagaagaaggcaatcgtcgacctgctgttcaagacaaacagaaaggtcacagtcaagcagctgaaggaagactacttcaagaagatcgaatgcttcgacagcgtcgaaatcagcggagtcgaagacagattcaacgcaagcctgggaacataccacgacctgctgaagatcatcaaggacaaggacttcctggacaacgaagaaaacgaagacatcctggaagacatcgtcctgacactgacactgttcgaagacagagaaatgatcgaagaaagactgaagacatacgcacacctgttcgacgacaaggtcatgaagcagctgaagagaagaagatacacaggatggggaagactgagcagaaagctgatcaacggaatcagagacaagcagagcggaaagacaatcctggacttcctgaagagcgacggattcgcaaacagaaacttcatgcagctgatccacgacgacagcctgacattcaaggaagacatccagaaggcacaggtcagcggacagggagacagcctgcacgaacacatcgcaaacctggcaggaagcccggcaatcaagaagggaatcctgcagacagtcaaggtcgtcgacgaactggtcaaggtcatgggaagacacaagccggaaaacatcgtcatcgaaatggcaagagaaaaccagacaacacagaagggacagaagaacagcagagaaagaatgaagagaatcgaagaaggaatcaaggaactgggaagccagatcctgaaggaacacccggtcgaaaacacacagctgcagaacgaaaagctgtacctgtactacctgcagaacggaagagacatgtacgtcgaccaggaactggacatcaacagactgagcgactacgacgtcgaccacatcgtcccgcagagcttcctgaaggacgacagcatcgacaacaaggtcctgacaagaagcgacaagaacagaggaaagagcgacaacgtcccgagcgaagaagtcgtcaagaagatgaagaactactggagacagctgctgaacgcaaagctgatcacacagagaaagttcgacaacctgacaaaggcagagagaggaggactgagcgaactggacaaggcaggattcatcaagagacagctggtcgaaacaagacagatcacaaagcacgtcgcacagatcctggacagcagaatgaacacaaagtacgacgaaaacgacaagctgatcagagaagtcaaggtcatcacactgaagagcaagctggtcagcgacttcagaaaggacttccagttctacaaggtcagagaaatcaacaactaccaccacgcacacgacgcatacctgaacgcagtcgtcggaacagcactgatcaagaagtacccgaagctggaaagcgaattcgtctacggagactacaaggtctacgacgtcagaaagatgatcgcaaagagcgaacaggaaatcggaaaggcaacagcaaagtacttcttctacagcaacatcatgaacttcttcaagacagaaatcacactggcaaacggagaaatcagaaagagaccgctgatcgaaacaaacggagaaacaggagaaatcgtctgggacaagggaagagacttcgcaacagtcagaaaggtcctgagcatgccgcaggtcaacatcgtcaagaagacagaagtccagacaggaggattcagcaaggaaagcatcctgccgaagagaaacagcgacaagctgatcgcaagaaagaaggactgggacccgaagaagtacggaggattcgacagcccgacagtcgcatacagcgtcctggtcgtcgcaaaggtcgaaaagggaaagagcaagaagctgaagagcgtcaaggaactgctgggaatcacaatcatggaaagaagcagcttcgaaaagaacccgatcgacttcctggaagcaaagggatacaaggaagtcaagaaggacctgatcatcaagctgccgaagtacagcctgttcgaactggaaaacggaagaaagagaatgctggcaagcgcaggagaactgcagaagggaaacgaactggcactgccgagcaagtacgtcaacttcctgtacctggcaagccactacgaaaagctgaagggaagcccggaagacaacgaacagaagcagctgttcgtcgaacagcacaagcactacctggacgaaatcatcgaacagatcagcgaattcagcaagagagtcatcctggcagacgcaaacctggacaaggtcctgagcgcatacaacaagcacagagacaagccgatcagagaacaggcagaaaacatcatccacctgttcacactgacaaacctgggagcaccggcagcattcaagtacttcgacacaacaatcgacagaaagagatacacaagcacaaaggaagtcctggacgcaacactgatccaccagagcatcacaggactgtacgaaacaagaatcgatctgagccagctgggaggagacagcggaggaagcacaaacctgagcgacatcatcgaaaaggaaacaggaaagcagctggtcatccaggaaagcatcctgatgctgccggaagaagtcgaagaagtcatcggaaacaagccggaaagcgacatcctggtccacacagcatacgacgaaagcacagacgaaaacgtcatgctgctgacaagcgacgcaccggaatacaagccgtgggcactggtcatccaggacagcaacggagaaaacaagatcaagatgctgagcggaggaagcccgaagaagaagagaaaggtctaatagtctagacatcacatttaaaagcatctcagcctaccatgagaataagagaaagaaaatgaagatcaatagcttattcatctctttttctttttcgttggtgtaaagccaacaccctgtctaaaaaacataaatttctttaatcattttgcctcttttctctgtgcttcaattaataaaaaatggaaagaacctcgagaaaaaaaaaaaaaaaaaaaaaaaaaaaaaagcgaaaaaaaaaaaaaaaaaaaaaaaaaaaaaaccgaaaaaaaaaaaaaaaaaaaaaaaaaaaaaaaaaaaaaaat

SEQ ID NO: 358-359 - skipped (2 entries)

SEQ ID NO: 360 - DNA, 3363 bp, synthetic construct
  misc_feature 1..3363: note = Synthetic
  source 1..3363: mol_type = other DNA
atggacggctccggcggcggctcccccaagaagaagcggaaggtggaggacaagcggcccgccgccaccaagaaggccggccaggccaagaagaagaagggcggctccggcggcggcgccgccttcaagcccaaccccatcaactacatcctgggcctggacatcggcatcgcctccgtgggctgggccatggtggagatcgacgaggaggagaaccccatccggctgatcgacctgggcgtgcgggtgttcgagcgggccgaggtgcccaagaccggcgactccctggccatggcccggcggctggcccggtccgtgcggcggctgacccggcggcgggcccaccggctgctgcgggcccggcggctgctgaagcgggagggcgtgctgcaggccgccgacttcgacgagaacggcctgatcaagtccctgcccaacaccccctggcagctgcgggccgccgccctggaccggaagctgacccccctggagtggtccgccgtgctgctgcacctgatcaagcaccggggctacctgtcccagcggaagaacgagggcgagaccgccgacaaggagctgggcgccctgctgaagggcgtggccaacaacgcccacgccctgcagaccggcgacttccggacccccgccgagctggccctgaacaagttcgagaaggagtccggccacatccggaaccagcggggcgactactcccacaccttctcccggaaggacctgcaggccgagctgatcctgctgttcgagaagcagaaggagttcggcaacccccacgtgtccggcggcctgaaggagggcatcgagaccctgctgatgacccagcggcccgccctgtccggcgacgccgtgcagaagatgctgggccactgcaccttcgagcccgccgagcccaaggccgccaagaacacctacaccgccgagcggttcatctggctgaccaagctgaacaacctgcggatcctggagcagggctccgagcggcccctgaccgacaccgagcgggccaccctgatggacgagccctaccggaagtccaagctgacctacgcccaggcccggaagctgctgggcctggaggacaccgccttcttcaagggcctgcggtacggcaaggacaacgccgaggcctccaccctgatggagatgaaggcctaccacgccatctcccgggccctggagaaggagggcctgaaggacaagaagtcccccctgaacctgtcctccgagctgcaggacgagatcggcaccgccttctccctgttcaagaccgacgaggacatcaccggccggctgaaggaccgggtgcagcccgagatcctggaggccctgctgaagcacatctccttcgacaagttcgtgcagatctccctgaaggccctgcggcggatcgtgcccctgatggagcagggcaagcggtacgacgaggcctgcgccgagatctacggcgaccactacggcaagaagaacaccgaggagaagatctacctgccccccatccccgccgacgagatccggaaccccgtggtgctgcgggccctgtcccaggcccggaaggtgatcaacggcgtggtgcggcggtacggctcccccgcccggatccacatcgagaccgcccgggaggtgggcaagtccttcaaggaccggaaggagatcgagaagcggcaggaggagaaccggaaggaccgggagaaggccgccgccaagttccgggagtacttccccaacttcgtgggcgagcccaagtccaaggacatcctgaagctgcggctgtacgagcagcagcacggcaagtgcctgtactccggcaaggagatcaacctggtgcggctgaacgagaagggctacgtggagatcgaccacgccctgcccttctcccggacctgggacgactccttcaacaacaaggtgctggtgctgggctccgagaaccagaacaagggcaaccagaccccctacgagtacttcaacggcaaggacaactcccgggagtggcaggagttcaaggcccgggtggagacctcccggttcccccggtccaagaagcagcggatcctgctgcagaagttcgacgaggacggcttcaaggagtgcaacctgaacgacacccggtacgtgaaccggttcctgtgccagttcgtggccgaccacatcctgctgaccggcaagggcaagcggcgggtgttcgcctccaacggccagatcaccaacctgctgcggggcttctggggcctgcggaaggtgcgggccgagaacgaccggcaccacgccctggacgccgtggtggtggcctgctccaccgtggccatgcagcagaagatcacccggttcgtgcggtacaaggagatgaacgccttcgacggcaagaccatcgacaaggagaccggcaaggtgctgcaccagaagacccacttcccccagccctgggagttcttcgcccaggaggtgatgatccgggtgttcggcaagcccgacggcaagcccgagttcgaggaggccgacacccccgagaagctgcggaccctgctggccgagaagctgtcctcccggcccgaggccgtgcacgagtacgtgacccccctgttcgtgtcccgggcccccaaccggaagatgtccggcgcccacaaggacaccctgcggtccgccaagcggttcgtgaagcacaacgagaagatctccgtgaagcgggtgtggctgaccgagatcaagctggccgacctggagaacatggtgaactacaagaacggccgggagatcgagctgtacgaggccctgaaggcccggctggaggcctacggcggcaacgccaagcaggccttcgaccccaaggacaaccccttctacaagaagggcggccagctggtgaaggccgtgcgggtggagaagacccaggagtccggcgtgctgctgaacaagaagaacgcctacaccatcgccgacaacggcgacatggtgcgggtggacgtgttctgcaaggtggacaagaagggcaagaaccagtacttcatcgtgcccatctacgcctggcaggtggccgagaacatcctgcccgacatcgactgcaagggctaccggatcgacgactcctacaccttctgcttctccctgcacaagtacgacctgatcgccttccagaaggacgagaagtccaaggtggagttcgcctactacatcaactgcgactcctccaacggccggttctacctggcctggcacgacaagggctccaaggagcagcagttccggatctccacccagaacctggtgctgatccagaagtaccaggtgaacgagctgggcaaggagatccggccctgccggctgaagaagcggccccccgtgcggtag

SEQ ID NO: 361 - RNA, 4782 nt, synthetic construct
  misc_feature 1..4782: note = Synthetic
  source 1..4782: mol_type = other RNA
atggaggcctcccccgcctccggcccccggcacctgatggacccccacatcttcacctccaacttcaacaacggcatcggccggcacaagacctacctgtgctacgaggtggagcggctggacaacggcacctccgtgaagatggaccagcaccggggcttcctgcacaaccaggccaagaacctgctgtgcggcttctacggccggcacgccgagctgcggttcctggacctggtgccctccctgcagctggaccccgcccagatctaccgggtgacctggttcatctcctggtccccctgcttctcctggggctgcgccggcgaggtgcgggccttcctgcaggagaacacccacgtgcggctgcggatcttcgccgcccggatctacgactacgaccccctgtacaaggaggccctgcagatgctgcgggacgccggcgcccaggtgtccatcatgacctacgacgagttcaagcactgctgggacaccttcgtggaccaccagggctgccccttccagccctgggacggcctggacgagcactcccaggccctgtccggccggctgcgggccatcctgcagaaccagggcaacggcaccaaggactccaccaaggacatccccgagaccccctccaaggacgacaagaagtactccatcggcctggccatcggcaccaactccgtgggctgggccgtgatcaccgacgagtacaaggtgccctccaagaagttcaaggtgctgggcaacaccgaccggcactccatcaagaagaacctgatcggcgccctgctgttcgactccggcgagaccgccgaggccacccggctgaagcggaccgcccggcggcggtacacccggcggaagaaccggatctgctacctgcaggagatcttctccaacgagatggccaaggtggacgactccttcttccaccggctggaggagtccttcctggtggaggaggacaagaagcacgagcggcaccccatcttcggcaacatcgtggacgaggtggcctaccacgagaagtaccccaccatctaccacctgcggaagaagctggtggactccaccgacaaggccgacctgcggctgatctacctggccctggcccacatgatcaagttccggggccacttcctgatcgagggcgacctgaaccccgacaactccgacgtggacaagctgttcatccagctggtgcagacctacaaccagctgttcgaggagaaccccatcaacgcctccggcgtggacgccaaggccatcctgtccgcccggctgtccaagtcccggcggctggagaacctgatcgcccagctgcccggcgagaagaagaacggcctgttcggcaacctgatcgccctgtccctgggcctgacccccaacttcaagtccaacttcgacctggccgaggacgccaagctgcagctgtccaaggacacctacgacgacgacctggacaacctgctggcccagatcggcgaccagtacgccgacctgttcctggccgccaagaacctgtccgacgccatcctgctgtccgacatcctgcgggtgaacaccgagatcaccaaggcccccctgtccgcctccatgatcaagcggtacgacgagcaccaccaggacctgaccctgctgaaggccctggtgcggcagcagctgcccgagaagtacaaggagatcttcttcgaccagtccaagaacggctacgccggctacatcgacggcggcgcctcccaggaggagttctacaagttcatcaagcccatcctggagaagatggacggcaccgaggagctgctggtgaagctgaaccgggaggacctgctgcggaagcagcggaccttcgacaacggctccatcccccaccagatccacctgggcgagctgcacgccatcctgcggcggcaggaggacttctaccccttcctgaaggacaaccgggagaagatcgagaagatcctgaccttccggatcccctactacgtgggccccctggcccggggcaactcccggttcgcctggatgacccggaagtccgaggagaccatcaccccctggaacttcgaggaggtggtggacaagggcgcctccgcccagtccttcatcgagcggatgaccaacttcgacaagaacctgcccaacgagaaggtgctgcccaagcactccctgctgtacgagtacttcaccgtgtacaacgagctgaccaaggtgaagtacgtgaccgagggcatgcggaagcccgccttcctgtccggcgagcagaagaaggccatcgtggacctgctgttcaagaccaaccggaaggtgaccgtgaagcagctgaaggaggactacttcaagaagatcgagtgcttcgactccgtggagatctccggcgtggaggaccggttcaacgcctccctgggcacctaccacgacctgctgaagatcatcaaggacaaggacttcctggacaacgaggagaacgaggacatcctggaggacatcgtgctgaccctgaccctgttcgaggaccgggagatgatcgaggagcggctgaagacctacgcccacctgttcgacgacaaggtgatgaagcagctgaagcggcggcggtacaccggctggggccggctgtcccggaagctgatcaacggcatccgggacaagcagtccggcaagaccatcctggacttcctgaagtccgacggcttcgccaaccggaacttcatgcagctgatccacgacgactccctgaccttcaaggaggacatccagaaggcccaggtgtccggccagggcgactccctgcacgagcacatcgccaacctggccggctcccccgccatcaagaagggcatcctgcagaccgtgaaggtggtggacgagctggtgaaggtgatgggccggcacaagcccgagaacatcgtgatcgagatggcccgggagaaccagaccacccagaagggccagaagaactcccgggagcggatgaagcggatcgaggagggcatcaaggagctgggctcccagatcctgaaggagcaccccgtggagaacacccagctgcagaacgagaagctgtacctgtactacctgcagaacggccgggacatgtacgtggaccaggagctggacatcaaccggctgtccgactacgacgtggaccacatcgtgccccagtccttcctgaaggacgactccatcgacaacaaggtgctgacccggtccgacaagaaccggggcaagtccgacaacgtgccctccgaggaggtggtgaagaagatgaagaactactggcggcagctgctgaacgccaagctgatcacccagcggaagttcgacaacctgaccaaggccgagcggggcggcctgtccgagctggacaaggccggcttcatcaagcggcagctggtggagacccggcagatcaccaagcacgtggcccagatcctggactcccggatgaacaccaagtacgacgagaacgacaagctgatccgggaggtgaaggtgatcaccctgaagtccaagctggtgtccgacttccggaaggacttccagttctacaaggtgcgggagatcaacaactaccaccacgcccacgacgcctacctgaacgccgtggtgggcaccgccctgatcaagaagtaccccaagctggagtccgagttcgtgtacggcgactacaaggtgtacgacgtgcggaagatgatcgccaagtccgagcaggagatcggcaaggccaccgccaagtacttcttctactccaacatcatgaacttcttcaagaccgagatcaccctggccaacggcgagatccggaagcggcccctgatcgagaccaacggcgagaccggcgagatcgtgtgggacaagggccgggacttcgccaccgtgcggaaggtgctgtccatgccccaggtgaacatcgtgaagaagaccgaggtgcagaccggcggcttctccaaggagtccatcctgcccaagcggaactccgacaagctgatcgcccggaagaaggactgggaccccaagaagtacggcggcttcgactcccccaccgtggcctactccgtgctggtggtggccaaggtggagaagggcaagtccaagaagctgaagtccgtgaaggagctgctgggcatcaccatcatggagcggtcctccttcgagaagaaccccatcgacttcctggaggccaagggctacaaggaggtgaagaaggacctgatcatcaagctgcccaagtactccctgttcgagctggagaacggccggaagcggatgctggcctccgccggcgagctgcagaagggcaacgagctggccctgccctccaagtacgtgaacttcctgtacctggcctcccactacgagaagctgaagggctcccccgaggacaacgagcagaagcagctgttcgtggagcagcacaagcactacctggacgagatcatcgagcagatctccgagttctccaagcgggtgatcctggccgacgccaacctggacaaggtgctgtccgcctacaacaagcaccgggacaagcccatccgggagcaggccgagaacatcatccacctgttcaccctgaccaacctgggcgcccccgccgccttcaagtacttcgacaccaccatcgaccggaagcggtacacctccaccaaggaggtgctggacgccaccctgatccaccagtccatcaccggcctgtacgagacccggatcgacctgtcccagctgggcggcgacggcggcggctcccccaagaagaagcggaaggtgtga

SEQ ID NO: 362 - RNA, 4782 nt, synthetic construct
  misc_feature 1..4782: note = Synthetic
  source 1..4782: mol_type = other RNA
atggaggcctcccccgcctccggcccccggcacctgatggacccccacatcttcacctccaacttcaacaacggcatcggccggcacaagacctacctgtgctacgaggtggagcggctggacaacggcacctccgtgaagatggaccagcaccggggcttcctgcacaaccaggccaagaacctgctgtgcggcttctacggccggcacgccgagctgcggttcctggacctggtgccctccctgcagctggaccccgcccagatctaccgggtgacctggttcatctcctggtccccctgcttctcctggggctgcgccggcgaggtgcgggccttcctgcaggagaacacccacgtgcggctgcggatcttcgccgcccggatctacgactacgaccccctgtacaaggaggccctgcagatgctgcgggacgccggcgcccaggtgtccatcatgacctacgacgagttcaagcactgctgggacaccttcgtggaccaccagggctgccccttccagccctgggacggcctggacgagcactcccaggccctgtccggccggctgcgggccatcctgcagaaccagggcaacggccgggacgtgcggcagcccgaggtgaaggaggagaagcccgagtccgacaagaagtactccatcggcctggccatcggcaccaactccgtgggctgggccgtgatcaccgacgagtacaaggtgccctccaagaagttcaaggtgctgggcaacaccgaccggcactccatcaagaagaacctgatcggcgccctgctgttcgactccggcgagaccgccgaggccacccggctgaagcggaccgcccggcggcggtacacccggcggaagaaccggatctgctacctgcaggagatcttctccaacgagatggccaaggtggacgactccttcttccaccggctggaggagtccttcctggtggaggaggacaagaagcacgagcggcaccccatcttcggcaacatcgtggacgaggtggcctaccacgagaagtaccccaccatctaccacctgcggaagaagctggtggactccaccgacaaggccgacctgcggctgatctacctggccctggcccacatgatcaagttccggggccacttcctgatcgagggcgacctgaaccccgacaactccgacgtggacaagctgttcatccagctggtgcagacctacaaccagctgttcgaggagaaccccatcaacgcctccggcgtggacgccaaggccatcctgtccgcccggctgtccaagtcccggcggctggagaacctgatcgcccagctgcccggcgagaagaagaacggcctgttcggcaacctgatcgccctgtccctgggcctgacccccaacttcaagtccaacttcgacctggccgaggacgccaagctgcagctgtccaaggacacctacgacgacgacctggacaacctgctggcccagatcggcgaccagtacgccgacctgttcctggccgccaagaacctgtccgacgccatcctgctgtccgacatcctgcgggtgaacaccgagatcaccaaggcccccctgtccgcctccatgatcaagcggtacgacgagcaccaccaggacctgaccctgctgaaggccctggtgcggcagcagctgcccgagaagtacaaggagatcttcttcgaccagtccaagaacggctacgccggctacatcgacggcggcgcctcccaggaggagttctacaagttcatcaagcccatcctggagaagatggacggcaccgaggagctgctggtgaagctgaaccgggaggacctgctgcggaagcagcggaccttcgacaacggctccatcccccaccagatccacctgggcgagctgcacgccatcctgcggcggcaggaggacttctaccccttcctgaaggacaaccgggagaagatcgagaagatcctgaccttccggatcccctactacgtgggccccctggcccggggcaactcccggttcgcctggatgacccggaagtccgaggagaccatcaccccctggaacttcgaggaggtggtggacaagggcgcctccgcccagtccttcatcgagcggatgaccaacttcgacaagaacctgcccaacgagaaggtgctgcccaagcactccctgctgtacgagtacttcaccgtgtacaacgagctgaccaaggtgaagtacgtgaccgagggcatgcggaagcccgccttcctgtccggcgagcagaagaaggccatcgtggacctgctgttcaagaccaaccggaaggtgaccgtgaagcagctgaaggaggactacttcaagaagatcgagtgcttcgactccgtggagatctccggcgtggaggaccggttcaacgcctccctgggcacctaccacgacctgctgaagatcatcaaggacaaggacttcctggacaacgaggagaacgaggacatcctggaggacatcgtgctgaccctgaccctgttcgaggaccgggagatgatcgaggagcggctgaagacctacgcccacctgttcgacgacaaggtgatgaagcagctgaagcggcggcggtacaccggctggggccggctgtcccggaagctgatcaacggcatccgggacaagcagtccggcaagaccatcctggacttcctgaagtccgacggcttcgccaaccggaacttcatgcagctgatccacgacgactccctgaccttcaaggaggacatccagaaggcccaggtgtccggccagggcgactccctgcacgagcacatcgccaacctggccggctcccccgccatcaagaagggcatcctgcagaccgtgaaggtggtggacgagctggtgaaggtgatgggccggcacaagcccgagaacatcgtgatcgagatggcccgggagaaccagaccacccagaagggccagaagaactcccgggagcggatgaagcggatcgaggagggcatcaaggagctgggctcccagatcctgaaggagcaccccgtggagaacacccagctgcagaacgagaagctgtacctgtactacctgcagaacggccgggacatgtacgtggaccaggagctggacatcaaccggctgtccgactacgacgtggaccacatcgtgccccagtccttcctgaaggacgactccatcgacaacaaggtgctgacccggtccgacaagaaccggggcaagtccgacaacgtgccctccgaggaggtggtgaagaagatgaagaactactggcggcagctgctgaacgccaagctgatcacccagcggaagttcgacaacctgaccaaggccgagcggggcggcctgtccgagctggacaaggccggcttcatcaagcggcagctggtggagacccggcagatcaccaagcacgtggcccagatcctggactcccggatgaacaccaagtacgacgagaacgacaagctgatccgggaggtgaaggtgatcaccctgaagtccaagctggtgtccgacttccggaaggacttccagttctacaaggtgcgggagatcaacaactaccaccacgcccacgacgcctacctgaacgccgtggtgggcaccgccctgatcaagaagtaccccaagctggagtccgagttcgtgtacggcgactacaaggtgtacgacgtgcggaagatgatcgccaagtccgagcaggagatcggcaaggccaccgccaagtacttcttctactccaacatcatgaacttcttcaagaccgagatcaccctggccaacggcgagatccggaagcggcccctgatcgagaccaacggcgagaccggcgagatcgtgtgggacaagggccgggacttcgccaccgtgcggaaggtgctgtccatgccccaggtgaacatcgtgaagaagaccgaggtgcagaccggcggcttctccaaggagtccatcctgcccaagcggaactccgacaagctgatcgcccggaagaaggactgggaccccaagaagtacggcggcttcgactcccccaccgtggcctactccgtgctggtggtggccaaggtggagaagggcaagtccaagaagctgaagtccgtgaaggagctgctgggcatcaccatcatggagcggtcctccttcgagaagaaccccatcgacttcctggaggccaagggctacaaggaggtgaagaaggacctgatcatcaagctgcccaagtactccctgttcgagctggagaacggccggaagcggatgctggcctccgccggcgagctgcagaagggcaacgagctggccctgccctccaagtacgtgaacttcctgtacctggcctcccactacgagaagctgaagggctcccccgaggacaacgagcagaagcagctgttcgtggagcagcacaagcactacctggacgagatcatcgagcagatctccgagttctccaagcgggtgatcctggccgacgccaacctggacaaggtgctgtccgcctacaacaagcaccgggacaagcccatccgggagcaggccgagaacatcatccacctgttcaccctgaccaacctgggcgcccccgccgccttcaagtacttcgacaccaccatcgaccggaagcggtacacctccaccaaggaggtgctggacgccaccctgatccaccagtccatcaccggcctgtacgagacccggatcgacctgtcccagctgggcggcgacggcggcggctcccccaagaagaagcggaaggtgtga

SEQ ID NO: 363 - RNA, 4782 nt, synthetic construct
  misc_feature 1..4782: note = Synthetic
  source 1..4782: mol_type = other RNA
atggaggcctcccccgcctccggcccccggcacctgatggacccccacatcttcacctccaacttcaacaacggcatcggccggcacaagacctacctgtgctacgaggtggagcggctggacaacggcacctccgtgaagatggaccagcaccggggcttcctgcacaaccaggccaagaacctgctgtgcggcttctacggccggcacgccgagctgcggttcctggacctggtgccctccctgcagctggaccccgcccagatctaccgggtgacctggttcatctcctggtccccctgcttctcctggggctgcgccggcgaggtgcgggccttcctgcaggagaacacccacgtgcggctgcggatcttcgccgcccggatctacgactacgaccccctgtacaaggaggccctgcagatgctgcgggacgccggcgcccaggtgtccatcatgacctacgacgagttcaagcactgctgggacaccttcgtggaccaccagggctgccccttccagccctgggacggcctggacgagcactcccaggccctgtccggccggctgcgggccatcctgcagaaccagggcaacgagggcaagtcctccggctccggctccgagtccaagtccaccgccggcgacaagaagtactccatcggcctggccatcggcaccaactccgtgggctgggccgtgatcaccgacgagtacaaggtgccctccaagaagttcaaggtgctgggcaacaccgaccggcactccatcaagaagaacctgatcggcgccctgctgttcgactccggcgagaccgccgaggccacccggctgaagcggaccgcccggcggcggtacacccggcggaagaaccggatctgctacctgcaggagatcttctccaacgagatggccaaggtggacgactccttcttccaccggctggaggagtccttcctggtggaggaggacaagaagcacgagcggcaccccatcttcggcaacatcgtggacgaggtggcctaccacgagaagtaccccaccatctaccacctgcggaagaagctggtggactccaccgacaaggccgacctgcggctgatctacctggccctggcccacatgatcaagttccggggccacttcctgatcgagggcgacctgaaccccgacaactccgacgtggacaagctgttcatccagctggtgcagacctacaaccagctgttcgaggagaaccccatcaacgcctccggcgtggacgccaaggccatcctgtccgcccggctgtccaagtcccggcggctggagaacctgatcgcccagctgcccggcgagaagaagaacggcctgttcggcaacctgatcgccctgtccctgggcctgacccccaacttcaagtccaacttcgacctggccgaggacgccaagctgcagctgtccaaggacacctacgacgacgacctggacaacctgctggcccagatcggcgaccagtacgccgacctgttcctggccgccaagaacctgtccgacgccatcctgctgtccgacatcctgcgggtgaacaccgagatcaccaaggcccccctgtccgcctccatgatcaagcggtacgacgagcaccaccaggacctgaccctgctgaaggccctggtgcggcagcagctgcccgagaagtacaaggagatcttcttcgaccagtccaagaacggctacgccggctacatcgacggcggcgcctcccaggaggagttctacaagttcatcaagcccatcctggagaagatggacggcaccgaggagctgctggtgaagctgaaccgggaggacctgctgcggaagcagcggaccttcgacaacggctccatcccccaccagatccacctgggcgagctgcacgccatcctgcggcggcaggaggacttctaccccttcctgaaggacaaccgggagaagatcgagaagatcctgaccttccggatcccctactacgtgggccccctggcccggggcaactcccggttcgcctggatgacccggaagtccgaggagaccatcaccccctggaacttcgaggaggtggtggacaagggcgcctccgcccagtccttcatcgagcggatgaccaacttcgacaagaacctgcccaacgagaaggtgctgcccaagcactccctgctgtacgagtacttcaccgtgtacaacgagctgaccaaggtgaagtacgtgaccgagggcatgcggaagcccgccttcctgtccggcgagcagaagaaggccatcgtggacctgctgttcaagaccaaccggaaggtgaccgtgaagcagctgaaggaggactacttcaagaagatcgagtgcttcgactccgtggagatctccggcgtggaggaccggttcaacgcctccctgggcacctaccacgacctgctgaagatcatcaaggacaaggacttcctggacaacgaggagaacgaggacatcctggaggacatcgtgctgaccctgaccctgttcgaggaccgggagatgatcgaggagcggctgaagacctacgcccacctgttcgacgacaaggtgatgaagcagctgaagcggcggcggtacaccggctggggccggctgtcccggaagctgatcaacggcatccgggacaagcagtccggcaagaccatcctggacttcctgaagtccgacggcttcgccaaccggaacttcatgcagctgatccacgacgactccctgaccttcaaggaggacatccagaaggcccaggtgtccggccagggcgactccctgcacgagcacatcgccaacctggccggctcccccgccatcaagaagggcatcctgcagaccgtgaaggtggtggacgagctggtgaaggtgatgggccggcacaagcccgagaacatcgtgatcgagatggcccgggagaaccagaccacccagaagggccagaagaactcccgggagcggatgaagcggatcgaggagggcatcaaggagctgggctcccagatcctgaaggagcaccccgtggagaacacccagctgcagaacgagaagctgtacctgtactacctgcagaacggccgggacatgtacgtggaccaggagctggacatcaaccggctgtccgactacgacgtggaccacatcgtgccccagtccttcctgaaggacgactccatcgacaacaaggtgctgacccggtccgacaagaaccggggcaagtccgacaacgtgccctccgaggaggtggtgaagaagatgaagaactactggcggcagctgctgaacgccaagctgatcacccagcggaagttcgacaacctgaccaaggccgagcggggcggcctgtccgagctggacaaggccggcttcatcaagcggcagctggtggagacccggcagatcaccaagcacgtggcccagatcctggactcccggatgaacaccaagtacgacgagaacgacaagctgatccgggaggtgaaggtgatcaccctgaagtccaagctggtgtccgacttccggaaggacttccagttctacaaggtgcgggagatcaacaactaccaccacgcccacgacgcctacctgaacgccgtggtgggcaccgccctgatcaagaagtaccccaagctggagtccgagttcgtgtacggcgactacaaggtgtacgacgtgcggaagatgatcgccaagtccgagcaggagatcggcaaggccaccgccaagtacttcttctactccaacatcatgaacttcttcaagaccgagatcaccctggccaacggcgagatccggaagcggcccctgatcgagaccaacggcgagaccggcgagatcgtgtgggacaagggccgggacttcgccaccgtgcggaaggtgctgtccatgccccaggtgaacatcgtgaagaagaccgaggtgcagaccggcggcttctccaaggagtccatcctgcccaagcggaactccgacaagctgatcgcccggaagaaggactgggaccccaagaagtacggcggcttcgactcccccaccgtggcctactccgtgctggtggtggccaaggtggagaagggcaagtccaagaagctgaagtccgtgaaggagctgctgggcatcaccatcatggagcggtcctccttcgagaagaaccccatcgacttcctggaggccaagggctacaaggaggtgaagaaggacctgatcatcaagctgcccaagtactccctgttcgagctggagaacggccggaagcggatgctggcctccgccggcgagctgcagaagggcaacgagctggccctgccctccaagtacgtgaacttcctgtacctggcctcccactacgagaagctgaagggctcccccgaggacaacgagcagaagcagctgttcgtggagcagcacaagcactacctggacgagatcatcgagcagatctccgagttctccaagcgggtgatcctggccgacgccaacctggacaaggtgctgtccgcctacaacaagcaccgggacaagcccatccgggagcaggccgagaacatcatccacctgttcaccctgaccaacctgggcgcccccgccgccttcaagtacttcgacaccaccatcgaccggaagcggtacacctccaccaaggaggtgctggacgccaccctgatccaccagtccatcaccggcctgtacgagacccggatcgacctgtcccagctgggcggcgacggcggcggctcccccaagaagaagcggaaggtgtga

SEQ ID NO: 364 - RNA, 4782 nt, synthetic construct
  misc_feature 1..4782: note = Synthetic
  source 1..4782: mol_type = other RNA
atggaggcctcccccgcctccggcccccggcacctgatggacccccacatcttcacctccaacttcaacaacggcatcggccggcacaagacctacctgtgctacgaggtggagcggctggacaacggcacctccgtgaagatggaccagcaccggggcttcctgcacaaccaggccaagaacctgctgtgcggcttctacggccggcacgccgagctgcggttcctggacctggtgccctccctgcagctggaccccgcccagatctaccgggtgacctggttcatctcctggtccccctgcttctcctggggctgcgccggcgaggtgcgggccttcctgcaggagaacacccacgtgcggctgcggatcttcgccgcccggatctacgactacgaccccctgtacaaggaggccctgcagatgctgcgggacgccggcgcccaggtgtccatcatgacctacgacgagttcaagcactgctgggacaccttcgtggaccaccagggctgccccttccagccctgggacggcctggacgagcactcccaggccctgtccggccggctgcgggccatcctgcagaaccagggcaacacccccggctcccccgccggctcccccacctccaccgaggagggcaccgacaagaagtactccatcggcctggccatcggcaccaactccgtgggctgggccgtgatcaccgacgagtacaaggtgccctccaagaagttcaaggtgctgggcaacaccgaccggcactccatcaagaagaacctgatcggcgccctgctgttcgactccggcgagaccgccgaggccacccggctgaagcggaccgcccggcggcggtacacccggcggaagaaccggatctgctacctgcaggagatcttctccaacgagatggccaaggtggacgactccttcttccaccggctggaggagtccttcctggtggaggaggacaagaagcacgagcggcaccccatcttcggcaacatcgtggacgaggtggcctaccacgagaagtaccccaccatctaccacctgcggaagaagctggtggactccaccgacaaggccgacctgcggctgatctacctggccctggcccacatgatcaagttccggggccacttcctgatcgagggcgacctgaaccccgacaactccgacgtggacaagctgttcatccagctggtgcagacctacaaccagctgttcgaggagaaccccatcaacgcctccggcgtggacgccaaggccatcctgtccgcccggctgtccaagtcccggcggctggagaacctgatcgcccagctgcccggcgagaagaagaacggcctgttcggcaacctgatcgccctgtccctgggcctgacccccaacttcaagtccaacttcgacctggccgaggacgccaagctgcagctgtccaaggacacctacgacgacgacctggacaacctgctggcccagatcggcgaccagtacgccgacctgttcctggccgccaagaacctgtccgacgccatcctgctgtccgacatcctgcgggtgaacaccgagatcaccaaggcccccctgtccgcctccatgatcaagcggtacgacgagcaccaccaggacctgaccctgctgaaggccctggtgcggcagcagctgcccgagaagtacaaggagatcttcttcgaccagtccaagaacggctacgccggctacatcgacggcggcgcctcccaggaggagttctacaagttcatcaagcccatcctggagaagatggacggcaccgaggagctgctggtgaagctgaaccgggaggacctgctgcggaagcagcggaccttcgacaacggctccatcccccaccagatccacctgggcgagctgcacgccatcctgcggcggcaggaggacttctaccccttcctgaaggacaaccgggagaagatcgagaagatcctgaccttccggatcccctactacgtgggccccctggcccggggcaactcccggttcgcctggatgacccggaagtccgaggagaccatcaccccctggaacttcgaggaggtggtggacaagggcgcctccgcccagtccttcatcgagcggatgaccaacttcgacaagaacctgcccaacgagaaggtgctgcccaagcactccctgctgtacgagtacttcaccgtgtacaacgagctgaccaaggtgaagtacgtgaccgagggcatgcggaagcccgccttcctgtccggcgagcagaagaaggccatcgtggacctgctgttcaagaccaaccggaaggtgaccgtgaagcagctgaaggaggactacttcaagaagatcgagtgcttcgactccgtggagatctccggcgtggaggaccggttcaacgcctccctgggcacctaccacgacctgctgaagatcatcaaggacaaggacttcctggacaacgaggagaacgaggacatcctggaggacatcgtgctgaccctgaccctgttcgaggaccgggagatgatcgaggagcggctgaagacctacgcccacctgttcgacgacaaggtgatgaagcagctgaagcggcggcggtacaccggctggggccggctgtcccggaagctgatcaacggcatccgggacaagcagtccggcaagaccatcctggacttcctgaagtccgacggcttcgccaaccggaacttcatgcagctgatccacgacgactccctgaccttcaaggaggacatccagaaggcccaggtgtccggccagggcgactccctgcacgagcacatcgccaacctggccggctcccccgccatcaagaagggcatcctgcagaccgtgaaggtggtggacgagctggtgaaggtgatgggccggcacaagcccgagaacatcgtgatcgagatggcccgggagaaccagaccacccagaagggccagaagaactcccgggagcggatgaagcggatcgaggagggcatcaaggagctgggctcccagatcctgaaggagcaccccgtggagaacacccagctgcagaacgagaagctgtacctgtactacctgcagaacggccgggacatgtacgtggaccaggagctggacatcaaccggctgtccgactacgacgtggaccacatcgtgccccagtccttcctgaaggacgactccatcgacaacaaggtgctgacccggtccgacaagaaccggggcaagtccgacaacgtgccctccgaggaggtggtgaagaagatgaagaactactggcggcagctgctgaacgccaagctgatcacccagcggaagttcgacaacctgaccaaggccgagcggggcggcctgtccgagctggacaaggccggcttcatcaagcggcagctggtggagacccggcagatcaccaagcacgtggcccagatcctggactcccggatgaacaccaagtacgacgagaacgacaagctgatccgggaggtgaaggtgatcaccctgaagtccaagctggtgtccgacttccggaaggacttccagttctacaaggtgcgggagatcaacaactaccaccacgcccacgacgcctacctgaacgccgtggtgggcaccgccctgatcaagaagtaccccaagctggagtccgagttcgtgtacggcgactacaaggtgtacgacgtgcggaagatgatcgccaagtccgagcaggagatcggcaaggccaccgccaagtacttcttctactccaacatcatgaacttcttcaagaccgagatcaccctggccaacggcgagatccggaagcggcccctgatcgagaccaacggcgagaccggcgagatcgtgtgggacaagggccgggacttcgccaccgtgcggaaggtgctgtccatgccccaggtgaacatcgtgaagaagaccgaggtgcagaccggcggcttctccaaggagtccatcctgcccaagcggaactccgacaagctgatcgcccggaagaaggactgggaccccaagaagtacggcggcttcgactcccccaccgtggcctactccgtgctggtggtggccaaggtggagaagggcaagtccaagaagctgaagtccgtgaaggagctgctgggcatcaccatcatggagcggtcctccttcgagaagaaccccatcgacttcctggaggccaagggctacaaggaggtgaagaaggacctgatcatcaagctgcccaagtactccctgttcgagctggagaacggccggaagcggatgctggcctccgccggcgagctgcagaagggcaacgagctggccctgccctccaagtacgtgaacttcctgtacctggcctcccactacgagaagctgaagggctcccccgaggacaacgagcagaagcagctgttcgtggagcagcacaagcactacctggacgagatcatcgagcagatctccgagttctccaagcgggtgatcctggccgacgccaacctggacaaggtgctgtccgcctacaacaagcaccgggacaagcccatccgggagcaggccgagaacatcatccacctgttcaccctgaccaacctgggcgcccccgccgccttcaagtacttcgacaccaccatcgaccggaagcggtacacctccaccaaggaggtgctggacgccaccctgatccaccagtccatcaccggcctgtacgagacccggatcgacctgtcccagctgggcggcgacggcggcggctcccccaagaagaagcggaaggtgtga

SEQ ID NO: 365 - RNA, 4782 nt, synthetic construct
  misc_feature 1..4782: note = Synthetic
  source 1..4782: mol_type = other RNA
atggaggcctcccccgcctccggcccccggcacctgatggacccccacatcttcacctccaacttcaacaacggcatcggccggcacaagacctacctgtgctacgaggtggagcggctggacaacggcacctccgtgaagatggaccagcaccggggcttcctgcacaaccaggccaagaacctgctgtgcggcttctacggccggcacgccgagctgcggttcctggacctggtgccctccctgcagctggaccccgcccagatctaccgggtgacctggttcatctcctggtccccctgcttctcctggggctgcgccggcgaggtgcgggccttcctgcaggagaacacccacgtgcggctgcggatcttcgccgcccggatctacgactacgaccccctgtacaaggaggccctgcagatgctgcgggacgccggcgcccaggtgtccatcatgacctacgacgagttcaagcactgctgggacaccttcgtggaccaccagggctgccccttccagccctgggacggcctggacgagcactcccaggccctgtccggccggctgcgggccatcctgcagaaccagggcaacggctccgagcccgccacctccggctccgagacccccggcacctccaccgacaagaagtactccatcggcctggccatcggcaccaactccgtgggctgggccgtgatcaccgacgagtacaaggtgccctccaagaagttcaaggtgctgggcaacaccgaccggcactccatcaagaagaacctgatcggcgccctgctgttcgactccggcgagaccgccgaggccacccggctgaagcggaccgcccggcggcggtacacccggcggaagaaccggatctgctacctgcaggagatcttctccaacgagatggccaaggtggacgactccttcttccaccggctggaggagtccttcctggtggaggaggacaagaagcacgagcggcaccccatcttcggcaacatcgtggacgaggtggcctaccacgagaagtaccccaccatctaccacctgcggaagaagctggtggactccaccgacaaggccgacctgcggctgatctacctggccctggcccacatgatcaagttccggggccacttcctgatcgagggcgacctgaaccccgacaactccgacgtggacaagctgttcatccagctggtgcagacctacaaccagctgttcgaggagaaccccatcaacgcctccggcgtggacgccaaggccatcctgtccgcccggctgtccaagtcccggcggctggagaacctgatcgcccagctgcccggcgagaagaagaacggcctgttcggcaacctgatcgccctgtccctgggcctgacccccaacttcaagtccaacttcgacctggccgaggacgccaagctgcagctgtccaaggacacctacgacgacgacctggacaacctgctggcccagatcggcgaccagtacgccgacctgttcctggccgccaagaacctgtccgacgccatcctgctgtccgacatcctgcgggtgaacaccgagatcaccaaggcccccctgtccgcctccatgatcaagcggtacgacgagcaccaccaggacctgaccctgctgaaggccctggtgcggcagcagctgcccgagaagtacaaggagatcttcttcgaccagtccaagaacggctacgccggctacatcgacggcggcgcctcccaggaggagttctacaagttcatcaagcccatcctggagaagatggacggcaccgaggagctgctggtgaagctgaaccgggaggacctgctgcggaagcagcggaccttcgacaacggctccatcccccaccagatccacctgggcgagctgcacgccatcctgcggcggcaggaggacttctaccccttcctgaaggacaaccgggagaagatcgagaagatcctgaccttccggatcccctactacgtgggccccctggcccggggcaactcccggttcgcctggatgacccggaagtccgaggagaccatcaccccctggaacttcgaggaggtggtggacaagggcgcctccgcccagtccttcatcgagcggatgaccaacttcgacaagaacctgcccaacgagaaggtgctgcccaagcactccctgctgtacgagtacttcaccgtgtacaacgagctgaccaaggtgaagtacgtgaccgagggcatgcggaagcccgccttcctgtccggcgagcagaagaaggccatcgtggacctgctgttcaagaccaaccggaaggtgaccgtgaagcagctgaaggaggactacttcaagaagatcgagtgcttcgactccgtggagatctccggcgtggaggaccggttcaacgcctccctgggcacctaccacgacctgctgaagatcatcaaggacaaggacttcctggacaacgaggagaacgaggacatcctggaggacatcgtgctgaccctgaccctgttcgaggaccgggagatgatcgaggagcggctgaagacctacgcccacctgttcgacgacaaggtgatgaagcagctgaagcggcggcggtacaccggctggggccggctgtcccggaagctgatcaacggcatccgggacaagcagtccggcaagaccatcctggacttcctgaagtccgacggcttcgccaaccggaacttcatgcagctgatccacgacgactccctgaccttcaaggaggacatccagaaggcccaggtgtccggccagggcgactccctgcacgagcacatcgccaacctggccggctcccccgccatcaagaagggcatcctgcagaccgtgaaggtggtggacgagctggtgaaggtgatgggccggcacaagcccgagaacatcgtgatcgagatggcccgggagaaccagaccacccagaagggccagaagaactcccgggagcggatgaagcggatcgaggagggcatcaaggagctgggctcccagatcctgaaggagcaccccgtggagaacacccagctgcagaacgagaagctgtacctgtactacctgcagaacggccgggacatgtacgtggaccaggagctggacatcaaccggctgtccgactacgacgtggaccacatcgtgccccagtccttcctgaaggacgactccatcgacaacaaggtgctgacccggtccgacaagaaccggggcaagtccgacaacgtgccctccgaggaggtggtgaagaagatgaagaactactggcggcagctgctgaacgccaagctgatcacccagcggaagttcgacaacctgaccaaggccgagcggggcggcctgtccgagctggacaaggccggcttcatcaagcggcagctggtggagacccggcagatcaccaagcacgtggcccagatcctggactcccggatgaacaccaagtacgacgagaacgacaagctgatccgggaggtgaaggtgatcaccctgaagtccaagctggtgtccgacttccggaaggacttccagttctacaaggtgcgggagatcaacaactaccaccacgcccacgacgcctacctgaacgccgtggtgggcaccgccctgatcaagaagtaccccaagctggagtccgagttcgtgtacggcgactacaaggtgtacgacgtgcggaagatgatcgccaagtccgagcaggagatcggcaaggccaccgccaagtacttcttctactccaacatcatgaacttcttcaagaccgagatcaccctggccaacggcgagatccggaagcggcccctgatcgagaccaacggcgagaccggcgagatcgtgtgggacaagggccgggacttcgccaccgtgcggaaggtgctgtccatgccccaggtgaacatcgtgaagaagaccgaggtgcagaccggcggcttctccaaggagtccatcctgcccaagcggaactccgacaagctgatcgcccggaagaaggactgggaccccaagaagtacggcggcttcgactcccccaccgtggcctactccgtgctggtggtggccaaggtggagaagggcaagtccaagaagctgaagtccgtgaaggagctgctgggcatcaccatcatggagcggtcctccttcgagaagaaccccatcgacttcctggaggccaagggctacaaggaggtgaagaaggacctgatcatcaagctgcccaagtactccctgttcgagctggagaacggccggaagcggatgctggcctccgccggcgagctgcagaagggcaacgagctggccctgccctccaagtacgtgaacttcctgtacctggcctcccactacgagaagctgaagggctcccccgaggacaacgagcagaagcagctgttcgtggagcagcacaagcactacctggacgagatcatcgagcagatctccgagttctccaagcgggtgatcctggccgacgccaacctggacaaggtgctgtccgcctacaacaagcaccgggacaagcccatccgggagcaggccgagaacatcatccacctgttcaccctgaccaacctgggcgcccccgccgccttcaagtacttcgacaccaccatcgaccggaagcggtacacctccaccaaggaggtgctggacgccaccctgatccaccagtccatcaccggcctgtacgagacccggatcgacctgtcccagctgggcggcgacggcggcggctcccccaagaagaagcggaaggtgtga

SEQ ID NO: 366 - RNA, 4779 nt, synthetic construct
  misc_feature 1..4779: note = Synthetic
  source 1..4779: mol_type = other RNA
atggaggcctcccccgcctccggcccccggcacctgatggacccccacatcttcacctccaacttcaacaacggcatcggccggcacaagacctacctgtgctacgaggtggagcggctggacaacggcacctccgtgaagatggaccagcaccggggcttcctgcacaaccaggccaagaacctgctgtgcggcttctacggccggcacgccgagctgcggttcctggacctggtgccctccctgcagctggaccccgcccagatctaccgggtgacctggttcatctcctggtccccctgcttctcctggggctgcgccggcgaggtgcgggccttcctgcaggagaacacccacgtgcggctgcggatcttcgccgcccggatctacgactacgaccccctgtacaaggaggccctgcagatgctgcgggacgccggcgcccaggtgtccatcatgacctacgacgagttcaagcactgctgggacaccttcgtggaccaccagggctgccccttccagccctgggacggcctggacgagcactcccaggccctgtccggccggctgcgggccatcctgcagaaccagggcaacgaggccgccgccaaggaggccgccgccaaggaggccgccgccaaggacaagaagtactccatcggcctggccatcggcaccaactccgtgggctgggccgtgatcaccgacgagtacaaggtgccctccaagaagttcaaggtgctgggcaacaccgaccggcactccatcaagaagaacctgatcggcgccctgctgttcgactccggcgagaccgccgaggccacccggctgaagcggaccgcccggcggcggtacacccggcggaagaaccggatctgctacctgcaggagatcttctccaacgagatggccaaggtggacgactccttcttccaccggctggaggagtccttcctggtggaggaggacaagaagcacgagcggcaccccatcttcggcaacatcgtggacgaggtggcctaccacgagaagtaccccaccatctaccacctgcggaagaagctggtggactccaccgacaaggccgacctgcggctgatctacctggccctggcccacatgatcaagttccggggccacttcctgatcgagggcgacctgaaccccgacaactccgacgtggacaagctgttcatccagctggtgcagacctacaaccagctgttcgaggagaaccccatcaacgcctccggcgtggacgccaaggccatcctgtccgcccggctgtccaagtcccggcggctggagaacctgatcgcccagctgcccggcgagaagaagaacggcctgttcggcaacctgatcgccctgtccctgggcctgacccccaacttcaagtccaacttcgacctggccgaggacgccaagctgcagctgtccaaggacacctacgacgacgacctggacaacctgctggcccagatcggcgaccagtacgccgacctgttcctggccgccaagaacctgtccgacgccatcctgctgtccgacatcctgcgggtgaacaccgagatcaccaaggcccccctgtccgcctccatgatcaagcggtacgacgagcaccaccaggacctgaccctgctgaaggccctggtgcggcagcagctgcccgagaagtacaaggagatcttcttcgaccagtccaagaacggctacgccggctacatcgacggcggcgcctcccaggaggagttctacaagttcatcaagcccatcctggagaagatggacggcaccgaggagctgctggtgaagctgaaccgggaggacctgctgcggaagcagcggaccttcgacaacggctccatcccccaccagatccacctgggcgagctgcacgccatcctgcggcggcaggaggacttctaccccttcctgaaggacaaccgggagaagatcgagaagatcctgaccttccggatcccctactacgtgggccccctggcccggggcaactcccggttcgcctggatgacccggaagtccgaggagaccatcaccccctggaacttcgaggaggtggtggacaagggcgcctccgcccagtccttcatcgagcggatgaccaacttcgacaagaacctgcccaacgagaaggtgctgcccaagcactccctgctgtacgagtacttcaccgtgtacaacgagctgaccaaggtgaagtacgtgaccgagggcatgcggaagcccgccttcctgtccggcgagcagaagaaggccatcgtggacctgctgttcaagaccaaccggaaggtgaccgtgaagcagctgaaggaggactacttcaagaagatcgagtgcttcgactccgtggagatctccggcgtggaggaccggttcaacgcctccctgggcacctaccacgacctgctgaagatcatcaaggacaaggacttcctggacaacgaggagaacgaggacatcctggaggacatcgtgctgaccctgaccctgttcgaggaccgggagatgatcgaggagcggctgaagacctacgcccacctgttcgacgacaaggtgatgaagcagctgaagcggcggcggtacaccggctggggccggctgtcccggaagctgatcaacggcatccgggacaagcagtccggcaagaccatcctggacttcctgaagtccgacggcttcgccaaccggaacttcatgcagctgatccacgacgactccctgaccttcaaggaggacatccagaaggcccaggtgtccggccagggcgactccctgcacgagcacatcgccaacctggccggctcccccgccatcaagaagggcatcctgcagaccgtgaaggtggtggacgagctggtgaaggtgatgggccggcacaagcccgagaacatcgtgatcgagatggcccgggagaaccagaccacccagaagggccagaagaactcccgggagcggatgaagcggatcgaggagggcatcaaggagctgggctcccagatcctgaaggagcaccccgtggagaacacccagctgcagaacgagaagctgtacctgtactacctgcagaacggccgggacatgtacgtggaccaggagctggacatcaaccggctgtccgactacgacgtggaccacatcgtgccccagtccttcctgaaggacgactccatcgacaacaaggtgctgacccggtccgacaagaaccggggcaagtccgacaacgtgccctccgaggaggtggtgaagaagatgaagaactactggcggcagctgctgaacgccaagctgatcacccagcggaagttcgacaacctgaccaaggccgagcggggcggcctgtccgagctggacaaggccggcttcatcaagcggcagctggtggagacccggcagatcaccaagcacgtggcccagatcctggactcccggatgaacaccaagtacgacgagaacgacaagctgatccgggaggtgaaggtgatcaccctgaagtccaagctggtgtccgacttccggaaggacttccagttctacaaggtgcgggagatcaacaactaccaccacgcccacgacgcctacctgaacgccgtggtgggcaccgccctgatcaagaagtaccccaagctggagtccgagttcgtgtacggcgactacaaggtgtacgacgtgcggaagatgatcgccaagtccgagcaggagatcggcaaggccaccgccaagtacttcttctactccaacatcatgaacttcttcaagaccgagatcaccctggccaacggcgagatccggaagcggcccctgatcgagaccaacggcgagaccggcgagatcgtgtgggacaagggccgggacttcgccaccgtgcggaaggtgctgtccatgccccaggtgaacatcgtgaagaagaccgaggtgcagaccggcggcttctccaaggagtccatcctgcccaagcggaactccgacaagctgatcgcccggaagaaggactgggaccccaagaagtacggcggcttcgactcccccaccgtggcctactccgtgctggtggtggccaaggtggagaagggcaagtccaagaagctgaagtccgtgaaggagctgctgggcatcaccatcatggagcggtcctccttcgagaagaaccccatcgacttcctggaggccaagggctacaaggaggtgaagaaggacctgatcatcaagctgcccaagtactccctgttcgagctggagaacggccggaagcggatgctggcctccgccggcgagctgcagaagggcaacgagctggccctgccctccaagtacgtgaacttcctgtacctggcctcccactacgagaagctgaagggctcccccgaggacaacgagcagaagcagctgttcgtggagcagcacaagcactacctggacgagatcatcgagcagatctccgagttctccaagcgggtgatcctggccgacgccaacctggacaaggtgctgtccgcctacaacaagcaccgggacaagcccatccgggagcaggccgagaacatcatccacctgttcaccctgaccaacctgggcgcccccgccgccttcaagtacttcgacaccaccatcgaccggaagcggtacacctccaccaaggaggtgctggacgccaccctgatccaccagtccatcaccggcctgtacgagacccggatcgacctgtcccagctgggcggcgacggcggcggctcccccaagaagaagcggaaggtgtga

SEQ ID NO: 367 - RNA, 5042 nt, synthetic construct
  misc_feature 1..5042: note = Synthetic
  source 1..5042: mol_type = other RNA
atggaagcaagcccggcaagcggaccgagacacctgatggacccgcacatcttcacaagcaacttcaacaacggaatcggaagacacaagacatacctgtgctacgaagtcgaaagactggacaacggaacaagcgtcaagatggaccagcacagaggattcctgcacaaccaggcaaagaacctgctgtgcggattctacggaagacacgcagaactgagattcctggacctggtcccgagcctgcagctggacccggcacagatctacagagtcacatggttcatcagctggagcccgtgcttcagctggggatgcgcaggagaagtcagagcatttctgcaggaaaacacacacgtcagactgagaatcttcgcagcaagaatctacgactacgacccgctgtacaaggaagcactgcagatgctgagagacgcaggagcacaggtcagcatcatgacatacgacgaattcaagcactgctgggacacattcgtcgaccaccagggatgcccgttccagccgtgggacggactggacgaacacagccaggcactgagcggaagactgagagcaatcctgcagaaccagggaaacggaggaggaggaagcgaagcagcagcaaaggaagcagcagcaaaggacaagaagtacagcatcggactggccatcggaacaaacagcgtcggatgggcagtcatcacagacgaatacaaggtcccgagcaagaagttcaaggtcctgggaaacacagacagacacagcatcaagaagaacctgatcggagcactgctgttcgacagcggagaaacagcagaagcaacaagactgaagagaacagcaagaagaagatacacaagaagaaagaacagaatctgctacctgcaggaaatcttcagcaacgaaatggcaaaggtcgacgacagcttcttccacagactggaagaaagcttcctggtcgaagaagacaagaagcacgaaagacacccgatcttcggaaacatcgtcgacgaagtcgcataccacgaaaagtacccgacaatctaccacctgagaaagaagctggtcgacagcacagacaaggcagacctgagactgatctacctggcactggcacacatgatcaagttcagaggacacttcctgatcgaaggagacctgaacccggacaacagcgacgtcgacaagctgttcatccagctggtccagacatacaaccagctgttcgaagaaaacccgatcaacgcaagcggagtcgacgcaaaggcaatcctgagcgcaagactgagcaagagcagaagactggaaaacctgatcgcacagctgccgggagaaaagaagaacggactgttcggaaacctgatcgcactgagcctgggactgacaccgaacttcaagagcaacttcgacctggcagaagacgcaaagctgcagctgagcaaggacacatacgacgacgacctggacaacctgctggcacagatcggagaccagtacgcagacctgttcctggcagcaaagaacctgagcgacgcaatcctgctgagcgacatcctgagagtcaacacagaaatcacaaaggcaccgctgagcgcaagcatgatcaagagatacgacgaacaccaccaggacctgacactgctgaaggcactggtcagacagcagctgccggaaaagtacaaggaaatcttcttcgaccagagcaagaacggatacgcaggatacatcgacggaggagcaagccaggaagaattctacaagttcatcaagccgatcctggaaaagatggacggaacagaagaactgctggtcaagctgaacagagaagacctgctgagaaagcagagaacattcgacaacggaagcatcccgcaccagatccacctgggagaactgcacgcaatcctgagaagacaggaagacttctacccgttcctgaaggacaacagagaaaagatcgaaaagatcctgacattcagaatcccgtactacgtcggaccgctggcaagaggaaacagcagattcgcatggatgacaagaaagagcgaagaaacaatcacaccgtggaacttcgaagaagtcgtcgacaagggagcaagcgcacagagcttcatcgaaagaatgacaaacttcgacaagaacctgccgaacgaaaaggtcctgccgaagcacagcctgctgtacgaatacttcacagtctacaacgaactgacaaaggtcaagtacgtcacagaaggaatgagaaagccggcattcctgagcggagaacagaagaaggcaatcgtcgacctgctgttcaagacaaacagaaaggtcacagtcaagcagctgaaggaagactacttcaagaagatcgaatgcttcgacagcgtcgaaatcagcggagtcgaagacagattcaacgcaagcctgggaacataccacgacctgctgaagatcatcaaggacaaggacttcctggacaacgaagaaaacgaagacatcctggaagacatcgtcctgacactgacactgttcgaagacagagaaatgatcgaagaaagactgaagacatacgcacacctgttcgacgacaaggtcatgaagcagctgaagagaagaagatacacaggatggggaagactgagcagaaagctgatcaacggaatcagagacaagcagagcggaaagacaatcctggacttcctgaagagcgacggattcgcaaacagaaacttcatgcagctgatccacgacgacagcctgacattcaaggaagacatccagaaggcacaggtcagcggacagggagacagcctgcacgaacacatcgcaaacctggcaggaagcccggcaatcaagaagggaatcctgcagacagtcaaggtcgtcgacgaactggtcaaggtcatgggaagacacaagccggaaaacatcgtcatcgaaatggcaagagaaaaccagacaacacagaagggacagaagaacagcagagaaagaatgaagagaatcgaagaaggaatcaaggaactgggaagccagatcctgaaggaacacccggtcgaaaacacacagctgcagaacgaaaagctgtacctgtactacctgcagaacggaagagacatgtacgtcgaccaggaactggacatcaacagactgagcgactacgacgtcgaccacatcgtcccgcagagcttcctgaaggacgacagcatcgacaacaaggtcctgacaagaagcgacaagaacagaggaaagagcgacaacgtcccgagcgaagaagtcgtcaagaagatgaagaactactggagacagctgctgaacgcaaagctgatcacacagagaaagttcgacaacctgacaaaggcagagagaggaggactgagcgaactggacaaggcaggattcatcaagagacagctggtcgaaacaagacagatcacaaagcacgtcgcacagatcctggacagcagaatgaacacaaagtacgacgaaaacgacaagctgatcagagaagtcaaggtcatcacactgaagagcaagctggtcagcgacttcagaaaggacttccagttctacaaggtcagagaaatcaacaactaccaccacgcacacgacgcatacctgaacgcagtcgtcggaacagcactgatcaagaagtacccgaagctggaaagcgaattcgtctacggagactacaaggtctacgacgtcagaaagatgatcgcaaagagcgaacaggaaatcggaaaggcaacagcaaagtacttcttctacagcaacatcatgaacttcttcaagacagaaatcacactggcaaacggagaaatcagaaagagaccgctgatcgaaacaaacggagaaacaggagaaatcgtctgggacaagggaagagacttcgcaacagtcagaaaggtcctgagcatgccgcaggtcaacatcgtcaagaagacagaagtccagacaggaggattcagcaaggaaagcatcctgccgaagagaaacagcgacaagctgatcgcaagaaagaaggactgggacccgaagaagtacggaggattcgacagcccgacagtcgcatacagcgtcctggtcgtcgcaaaggtcgaaaagggaaagagcaagaagctgaagagcgtcaaggaactgctgggaatcacaatcatggaaagaagcagcttcgaaaagaacccgatcgacttcctggaagcaaagggatacaaggaagtcaagaaggacctgatcatcaagctgccgaagtacagcctgttcgaactggaaaacggaagaaagagaatgctggcaagcgcaggagaactgcagaagggaaacgaactggcactgccgagcaagtacgtcaacttcctgtacctggcaagccactacgaaaagctgaagggaagcccggaagacaacgaacagaagcagctgttcgtcgaacagcacaagcactacctggacgaaatcatcgaacagatcagcgaattcagcaagagagtcatcctggcagacgcaaacctggacaaggtcctgagcgcatacaacaagcacagagacaagccgatcagagaacaggcagaaaacatcatccacctgttcacactgacaaacctgggagcaccggcagcattcaagtacttcgacacaacaatcgacagaaagagatacacaagcacaaaggaagtcctggacgcaacactgatccaccagagcatcacaggactgtacgaaacaagaatcgatctgagccagctgggaggagacagcggaggaagcacaaacctgagcgacatcatcgaaaaggaaacaggaaagcagctggtcatccaggaaagcatcctgatgctgccggaagaagtcgaagaagtcatcggaaacaagccggaaagcgacatcctggtccacacagcatacgacgaaagcacagacgaaaacgtcatgctgctgacaagcgacgcaccggaatacaagccgtgggcactggtcatccaggacagcaacggagaaaacaagatcaagatgctgagcggaggaagcccgaagaagaagagaaaggtctaata

SEQ ID NO: 368 - RNA, 5043 nt, synthetic construct
  misc_feature 1..5043: note = Synthetic
  source 1..5043: mol_type = other RNA
atggaagcaagcccggcaagcggaccgagacacctgatggacccgcacatcttcacaagcaacttcaacaacggaatcggaagacacaagacatacctgtgctacgaagtcgaaagactggacaacggaacaagcgtcaagatggaccagcacagaggattcctgcacaaccaggcaaagaacctgctgtgcggattctacggaagacacgcagaactgagattcctggacctggtcccgagcctgcagctggacccggcacagatctacagagtcacatggttcatcagctggagcccgtgcttcagctggggatgcgcaggagaagtcagagcatttctgcaggaaaacacacacgtcagactgagaatcttcgcagcaagaatctacgactacgacccgctgtacaaggaagcactgcagatgctgagagacgcaggagcacaggtcagcatcatgacatacgacgaattcaagcactgctgggacacattcgtcgaccaccagggatgcccgttccagccgtgggacggactggacgaacacagccaggcactgagcggaagactgagagcaatcctgcagaaccagggaaacgaggccgccgccaagggcggcggcggcagcggcggcggcggcagcgacaagaagtacagcatcggactggccatcggaacaaacagcgtcggatgggcagtcatcacagacgaatacaaggtcccgagcaagaagttcaaggtcctgggaaacacagacagacacagcatcaagaagaacctgatcggagcactgctgttcgacagcggagaaacagcagaagcaacaagactgaagagaacagcaagaagaagatacacaagaagaaagaacagaatctgctacctgcaggaaatcttcagcaacgaaatggcaaaggtcgacgacagcttcttccacagactggaagaaagcttcctggtcgaagaagacaagaagcacgaaagacacccgatcttcggaaacatcgtcgacgaagtcgcataccacgaaaagtacccgacaatctaccacctgagaaagaagctggtcgacagcacagacaaggcagacctgagactgatctacctggcactggcacacatgatcaagttcagaggacacttcctgatcgaaggagacctgaacccggacaacagcgacgtcgacaagctgttcatccagctggtccagacatacaaccagctgttcgaagaaaacccgatcaacgcaagcggagtcgacgcaaaggcaatcctgagcgcaagactgagcaagagcagaagactggaaaacctgatcgcacagctgccgggagaaaagaagaacggactgttcggaaacctgatcgcactgagcctgggactgacaccgaacttcaagagcaacttcgacctggcagaagacgcaaagctgcagctgagcaaggacacatacgacgacgacctggacaacctgctggcacagatcggagaccagtacgcagacctgttcctggcagcaaagaacctgagcgacgcaatcctgctgagcgacatcctgagagtcaacacagaaatcacaaaggcaccgctgagcgcaagcatgatcaagagatacgacgaacaccaccaggacctgacactgctgaaggcactggtcagacagcagctgccggaaaagtacaaggaaatcttcttcgaccagagcaagaacggatacgcaggatacatcgacggaggagcaagccaggaagaattctacaagttcatcaagccgatcctggaaaagatggacggaacagaagaactgctggtcaagctgaacagagaagacctgctgagaaagcagagaacattcgacaacggaagcatcccgcaccagatccacctgggagaactgcacgcaatcctgagaagacaggaagacttctacccgttcctgaaggacaacagagaaaagatcgaaaagatcctgacattcagaatcccgtactacgtcggaccgctggcaagaggaaacagcagattcgcatggatgacaagaaagagcgaagaaacaatcacaccgtggaacttcgaagaagtcgtcgacaagggagcaagcgcacagagcttcatcgaaagaatgacaaacttcgacaagaacctgccgaacgaaaaggtcctgccgaagcacagcctgctgtacgaatacttcacagtctacaacgaactgacaaaggtcaagtacgtcacagaaggaatgagaaagccggcattcctgagcggagaacagaagaaggcaatcgtcgacctgctgttcaagacaaacagaaaggtcacagtcaagcagctgaaggaagactacttcaagaagatcgaatgcttcgacagcgtcgaaatcagcggagtcgaagacagattcaacgcaagcctgggaacataccacgacctgctgaagatcatcaaggacaaggacttcctggacaacgaagaaaacgaagacatcctggaagacatcgtcctgacactgacactgttcgaagacagagaaatgatcgaagaaagactgaagacatacgcacacctgttcgacgacaaggtcatgaagcagctgaagagaagaagatacacaggatggggaagactgagcagaaagctgatcaacggaatcagagacaagcagagcggaaagacaatcctggacttcctgaagagcgacggattcgcaaacagaaacttcatgcagctgatccacgacgacagcctgacattcaaggaagacatccagaaggcacaggtcagcggacagggagacagcctgcacgaacacatcgcaaacctggcaggaagcccggcaatcaagaagggaatcctgcagacagtcaaggtcgtcgacgaactggtcaaggtcatgggaagacacaagccggaaaacatcgtcatcgaaatggcaagagaaaaccagacaacacagaagggacagaagaacagcagagaaagaatgaagagaatcgaagaaggaatcaaggaactgggaagccagatcctgaaggaacacccggtcgaaaacacacagctgcagaacgaaaagctgtacctgtactacctgcagaacggaagagacatgtacgtcgaccaggaactggacatcaacagactgagcgactacgacgtcgaccacatcgtcccgcagagcttcctgaaggacgacagcatcgacaacaaggtcctgacaagaagcgacaagaacagaggaaagagcgacaacgtcccgagcgaagaagtcgtcaagaagatgaagaactactggagacagctgctgaacgcaaagctgatcacacagagaaagttcgacaacctgacaaaggcagagagaggaggactgagcgaactggacaaggcaggattcatcaagagacagctggtcgaaacaagacagatcacaaagcacgtcgcacagatcctggacagcagaatgaacacaaagtacgacgaaaacgacaagctgatcagagaagtcaaggtcatcacactgaagagcaagctggtcagcgacttcagaaaggacttccagttctacaaggtcagagaaatcaacaactaccaccacgcacacgacgcatacctgaacgcagtcgtcggaacagcactgatcaagaagtacccgaagctggaaagcgaattcgtctacggagactacaaggtctacgacgtcagaaagatgatcgcaaagagcgaacaggaaatcggaaaggcaacagcaaagtacttcttctacagcaacatcatgaacttcttcaagacagaaatcacactggcaaacggagaaatcagaaagagaccgctgatcgaaacaaacggagaaacaggagaaatcgtctgggacaagggaagagacttcgcaacagtcagaaaggtcctgagcatgccgcaggtcaacatcgtcaagaagacagaagtccagacaggaggattcagcaaggaaagcatcctgccgaagagaaacagcgacaagctgatcgcaagaaagaaggactgggacccgaagaagtacggaggattcgacagcccgacagtcgcatacagcgtcctggtcgtcgcaaaggtcgaaaagggaaagagcaagaagctgaagagcgtcaaggaactgctgggaatcacaatcatggaaagaagcagcttcgaaaagaacccgatcgacttcctggaagcaaagggatacaaggaagtcaagaaggacctgatcatcaagctgccgaagtacagcctgttcgaactggaaaacggaagaaagagaatgctggcaagcgcaggagaactgcagaagggaaacgaactggcactgccgagcaagtacgtcaacttcctgtacctggcaagccactacgaaaagctgaagggaagcccggaagacaacgaacagaagcagctgttcgtcgaacagcacaagcactacctggacgaaatcatcgaacagatcagcgaattcagcaagagagtcatcctggcagacgcaaacctggacaaggtcctgagcgcatacaacaagcacagagacaagccgatcagagaacaggcagaaaacatcatccacctgttcacactgacaaacctgggagcaccggcagcattcaagtacttcgacacaacaatcgacagaaagagatacacaagcacaaaggaagtcctggacgcaacactgatccaccagagcatcacaggactgtacgaaacaagaatcgatctgagccagctgggaggagacagcggaggaagcacaaacctgagcgacatcatcgaaaaggaaacaggaaagcagctggtcatccaggaaagcatcctgatgctgccggaagaagtcgaagaagtcatcggaaacaagccggaaagcgacatcctggtccacacagcatacgacgaaagcacagacgaaaacgtcatgctgctgacaagcgacgcaccggaatacaagccgtgggcactggtcatccaggacagcaacggagaaaacaagatcaagatgctgagcggaggaagcccgaagaagaagagaaaggtctaatag

SEQ ID NO: 369 - RNA, 5043 nt, synthetic construct
  misc_feature 1..5043: note = Synthetic
  source 1..5043: mol_type = other RNA
atggaagcaagcccggcaagcggaccgagacacctgatggacccgcacatcttcacaagcaacttcaacaacggaatcggaagacacaagacatacctgtgctacgaagtcgaaagactggacaacggaacaagcgtcaagatggaccagcacagaggattcctgcacaaccaggcaaagaacctgctgtgcggattctacggaagacacgcagaactgagattcctggacctggtcccgagcctgcagctggacccggcacagatctacagagtcacatggttcatcagctggagcccgtgcttcagctggggatgcgcaggagaagtcagagcatttctgcaggaaaacacacacgtcagactgagaatcttcgcagcaagaatctacgactacgacccgctgtacaaggaagcactgcagatgctgagagacgcaggagcacaggtcagcatcatgacatacgacgaattcaagcactgctgggacacattcgtcgaccaccagggatgcccgttccagccgtgggacggactggacgaacacagccaggcactgagcggaagactgagagcaatcctgcagaaccagggaaacgaggccgccgccaaggaggccgccgccaaggaggccgccgccaaggacaagaagtacagcatcggactggccatcggaacaaacagcgtcggatgggcagtcatcacagacgaatacaaggtcccgagcaagaagttcaaggtcctgggaaacacagacagacacagcatcaagaagaacctgatcggagcactgctgttcgacagcggagaaacagcagaagcaacaagactgaagagaacagcaagaagaagatacacaagaagaaagaacagaatctgctacctgcaggaaatcttcagcaacgaaatggcaaaggtcgacgacagcttcttccacagactggaagaaagcttcctggtcgaagaagacaagaagcacgaaagacacccgatcttcggaaacatcgtcgacgaagtcgcataccacgaaaagtacccgacaatctaccacctgagaaagaagctggtcgacagcacagacaaggcagacctgagactgatctacctggcactggcacacatgatcaagttcagaggacacttcctgatcgaaggagacctgaacccggacaacagcgacgtcgacaagctgttcatccagctggtccagacatacaaccagctgttcgaagaaaacccgatcaacgcaagcggagtcgacgcaaaggcaatcctgagcgcaagactgagcaagagcagaagactggaaaacctgatcgcacagctgccgggagaaaagaagaacggactgttcggaaacctgatcgcactgagcctgggactgacaccgaacttcaagagcaacttcgacctggcagaagacgcaaagctgcagctgagcaaggacacatacgacgacgacctggacaacctgctggcacagatcggagaccagtacgcagacctgttcctggcagcaaagaacctgagcgacgcaatcctgctgagcgacatcctgagagtcaacacagaaatcacaaaggcaccgctgagcgcaagcatgatcaagagatacgacgaacaccaccaggacctgacactgctgaaggcactggtcagacagcagctgccggaaaagtacaaggaaatcttcttcgaccagagcaagaacggatacgcaggatacatcgacggaggagcaagccaggaagaattctacaagttcatcaagccgatcctggaaaagatggacggaacagaagaactgctggtcaagctgaacagagaagacctgctgagaaagcagagaacattcgacaacggaagcatcccgcaccagatccacctgggagaactgcacgcaatcctgagaagacaggaagacttctacccgttcctgaaggacaacagagaaaagatcgaaaagatcctgacattcagaatcccgtactacgtcggaccgctggcaagaggaaacagcagattcgcatggatgacaagaaagagcgaagaaacaatcacaccgtggaacttcgaagaagtcgtcgacaagggagcaagcgcacagagcttcatcgaaagaatgacaaacttcgacaagaacctgccgaacgaaaaggtcctgccgaagcacagcctgctgtacgaatacttcacagtctacaacgaactgacaaaggtcaagtacgtcacagaaggaatgagaaagccggcattcctgagcggagaacagaagaaggcaatcgtcgacctgctgttcaagacaaacagaaaggtcacagtcaagcagctgaaggaagactacttcaagaagatcgaatgcttcgacagcgtcgaaatcagcggagtcgaagacagattcaacgcaagcctgggaacataccacgacctgctgaagatcatcaaggacaaggacttcctggacaacgaagaaaacgaagacatcctggaagacatcgtcctgacactgacactgttcgaagacagagaaatgatcgaagaaagactgaagacatacgcacacctgttcgacgacaaggtcatgaagcagctgaagagaagaagatacacaggatggggaagactgagcagaaagctgatcaacggaatcagagacaagcagagcggaaagacaatcctggacttcctgaagagcgacggattcgcaaacagaaacttcatgcagctgatccacgacgacagcctgacattcaaggaagacatccagaaggcacaggtcagcggacagggagacagcctgcacgaacacatcgcaaacctggcaggaagcccggcaatcaagaagggaatcctgcagacagtcaaggtcgtcgacgaactggtcaaggtcatgggaagacacaagccggaaaacatcgtcatcgaaatggcaagagaaaaccagacaacacagaagggacagaagaacagcagagaaagaatgaagagaatcgaagaaggaatcaaggaactgggaagccagatcctgaaggaacacccggtcgaaaacacacagctgcagaacgaaaagctgtacctgtactacctgcagaacggaagagacatgtacgtcgaccaggaactggacatcaacagactgagcgactacgacgtcgaccacatcgtcccgcagagcttcctgaaggacgacagcatcgacaacaaggtcctgacaagaagcgacaagaacagaggaaagagcgacaacgtcccgagcgaagaagtcgtcaagaagatgaagaactactggagacagctgctgaacgcaaagctgatcacacagagaaagttcgacaacctgacaaaggcagagagaggaggactgagcgaactggacaaggcaggattcatcaagagacagctggtcgaaacaagacagatcacaaagcacgtcgcacagatcctggacagcagaatgaacacaaagtacgacgaaaacgacaagctgatcagagaagtcaaggtcatcacactgaagagcaagctggtcagcgacttcagaaaggacttccagttctacaaggtcagagaaatcaacaactaccaccacgcacacgacgcatacctgaacgcagtcgtcggaacagcactgatcaagaagtacccgaagctggaaagcgaattcgtctacggagactacaaggtctacgacgtcagaaagatgatcgcaaagagcgaacaggaaatcggaaaggcaacagcaaagtacttcttctacagcaacatcatgaacttcttcaagacagaaatcacactggcaaacggagaaatcagaaagagaccgctgatcgaaacaaacggagaaacaggagaaatcgtctgggacaagggaagagacttcgcaacagtcagaaaggtcctgagcatgccgcaggtcaacatcgtcaagaagacagaagtccagacaggaggattcagcaaggaaagcatcctgccgaagagaaacagcgacaagctgatcgcaagaaagaaggactgggacccgaagaagtacggaggattcgacagcccgacagtcgcatacagcgtcctggtcgtcgcaaaggtcgaaaagggaaagagcaagaagctgaagagcgtcaaggaactgctgggaatcacaatcatggaaagaagcagcttcgaaaagaacccgatcgacttcctggaagcaaagggatacaaggaagtcaagaaggacctgatcatcaagctgccgaagtacagcctgttcgaactggaaaacggaagaaagagaatgctggcaagcgcaggagaactgcagaagggaaacgaactggcactgccgagcaagtacgtcaacttcctgtacctggcaagccactacgaaaagctgaagggaagcccggaagacaacgaacagaagcagctgttcgtcgaacagcacaagcactacctggacgaaatcatcgaacagatcagcgaattcagcaagagagtcatcctggcagacgcaaacctggacaaggtcctgagcgcatacaacaagcacagagacaagccgatcagagaacaggcagaaaacatcatccacctgttcacactgacaaacctgggagcaccggcagcattcaagtacttcgacacaacaatcgacagaaagagatacacaagcacaaaggaagtcctggacgcaacactgatccaccagagcatcacaggactgtacgaaacaagaatcgatctgagccagctgggaggagacagcggaggaagcacaaacctgagcgacatcatcgaaaaggaaacaggaaagcagctggtcatccaggaaagcatcctgatgctgccggaagaagtcgaagaagtcatcggaaacaagccggaaagcgacatcctggtccacacagcatacgacgaaagcacagacgaaaacgtcatgctgctgacaagcgacgcaccggaatacaagccgtgggcactggtcatccaggacagcaacggagaaaacaagatcaagatgctgagcggaggaagcccgaagaagaagagaaaggtctaatag

SEQ ID NO: 370 - RNA, 5058 nt, synthetic construct
  misc_feature 1..5058: note = Synthetic
  source 1..5058: mol_type = other RNA
atggaagcaagcccggcaagcggaccgagacacctgatggacccgcacatcttcacaagcaacttcaacaacggaatcggaagacacaagacatacctgtgctacgaagtcgaaagactggacaacggaacaagcgtcaagatggaccagcacagaggattcctgcacaaccaggcaaagaacctgctgtgcggattctacggaagacacgcagaactgagattcctggacctggtcccgagcctgcagctggacccggcacagatctacagagtcacatggttcatcagctggagcccgtgcttcagctggggatgcgcaggagaagtcagagcatttctgcaggaaaacacacacgtcagactgagaatcttcgcagcaagaatctacgactacgacccgctgtacaaggaagcactgcagatgctgagagacgcaggagcacaggtcagcatcatgacatacgacgaattcaagcactgctgggacacattcgtcgaccaccagggatgcccgttccagccgtgggacggactggacgaacacagccaggcactgagcggaagactgagagcaatcctgcagaaccagggaaacggcggcggcggcagcggcggcggcggcagcggcggcggcggcagcggcggcggcggcagcgacaagaagtacagcatcggactggccatcggaacaaacagcgtcggatgggcagtcatcacagacgaatacaaggtcccgagcaagaagttcaaggtcctgggaaacacagacagacacagcatcaagaagaacctgatcggagcactgctgttcgacagcggagaaacagcagaagcaacaagactgaagagaacagcaagaagaagatacacaagaagaaagaacagaatctgctacctgcaggaaatcttcagcaacgaaatggcaaaggtcgacgacagcttcttccacagactggaagaaagcttcctggtcgaagaagacaagaagcacgaaagacacccgatcttcggaaacatcgtcgacgaagtcgcataccacgaaaagtacccgacaatctaccacctgagaaagaagctggtcgacagcacagacaaggcagacctgagactgatctacctggcactggcacacatgatcaagttcagaggacacttcctgatcgaaggagacctgaacccggacaacagcgacgtcgacaagctgttcatccagctggtccagacatacaaccagctgttcgaagaaaacccgatcaacgcaagcggagtcgacgcaaaggcaatcctgagcgcaagactgagcaagagcagaagactggaaaacctgatcgcacagctgccgggagaaaagaagaacggactgttcggaaacctgatcgcactgagcctgggactgacaccgaacttcaagagcaacttcgacctggcagaagacgcaaagctgcagctgagcaaggacacatacgacgacgacctggacaacctgctggcacagatcggagaccagtacgcagacctgttcctggcagcaaagaacctgagcgacgcaatcctgctgagcgacatcctgagagtcaacacagaaatcacaaaggcaccgctgagcgcaagcatgatcaagagatacgacgaacaccaccaggacctgacactgctgaaggcactggtcagacagcagctgccggaaaagtacaaggaaatcttcttcgaccagagcaagaacggatacgcaggatacatcgacggaggagcaagccaggaagaattctacaagttcatcaagccgatcctggaaaagatggacggaacagaagaactgctggtcaagctgaacagagaagacctgctgagaaagcagagaacattcgacaacggaagcatcccgcaccagatccacctgggagaactgcacgcaatcctgagaagacaggaagacttctacccgttcctgaaggacaacagagaaaagatcgaaaagatcctgacattcagaatcccgtactacgtcggaccgctggcaagaggaaacagcagattcgcatggatgacaagaaagagcgaagaaacaatcacaccgtggaacttcgaagaagtcgtcgacaagggagcaagcgcacagagcttcatcgaaagaatgacaaacttcgacaagaacctgccgaacgaaaaggtcctgccgaagcacagcctgctgtacgaatacttcacagtctacaacgaactgacaaaggtcaagtacgtcacagaaggaatgagaaagccggcattcctgagcggagaacagaagaaggcaatcgtcgacctgctgttcaagacaaacagaaaggtcacagtcaagcagctgaaggaagactacttcaagaagatcgaatgcttcgacagcgtcgaaatcagcggagtcgaagacagattcaacgcaagcctgggaacataccacgacctgctgaagatcatcaaggacaaggacttcctggacaacgaagaaaacgaagacatcctggaagacatcgtcctgacactgacactgttcgaagacagagaaatgatcgaagaaagactgaagacatacgcacacctgttcgacgacaaggtcatgaagcagctgaagagaagaagatacacaggatggggaagactgagcagaaagctgatcaacggaatcagagacaagcagagcggaaagacaatcctggacttcctgaagagcgacggattcgcaaacagaaacttcatgcagctgatccacgacgacagcctgacattcaaggaagacatccagaaggcacaggtcagcggacagggagacagcctgcacgaacacatcgcaaacctggcaggaagcccggcaatcaagaagggaatcctgcagacagtcaaggtcgtcgacgaactggtcaaggtcatgggaagacacaagccggaaaacatcgtcatcgaaatggcaagagaaaaccagacaacacagaagggacagaagaacagcagagaaagaatgaagagaatcgaagaaggaatcaaggaactgggaagccagatcctgaaggaacacccggtcgaaaacacacagctgcagaacgaaaagctgtacctgtactacctgcagaacggaagagacatgtacgtcgaccaggaactggacatcaacagactgagcgactacgacgtcgaccacatcgtcccgcagagcttcctgaaggacgacagcatcgacaacaaggtcctgacaagaagcgacaagaacagaggaaagagcgacaacgtcccgagcgaagaagtcgtcaagaagatgaagaactactggagacagctgctgaacgcaaagctgatcacacagagaaagttcgacaacctgacaaaggcagagagaggaggactgagcgaactggacaaggcaggattcatcaagagacagctggtcgaaacaagacagatcacaaagcacgtcgcacagatcctggacagcagaatgaacacaaagtacgacgaaaacgacaagctgatcagagaagtcaaggtcatcacactgaagagcaagctggtcagcgacttcagaaaggacttccagttctacaaggtcagagaaatcaacaactaccaccacgcacacgacgcatacctgaacgcagtcgtcggaacagcactgatcaagaagtacccgaagctggaaagcgaattcgtctacggagactacaaggtctacgacgtcagaaagatgatcgcaaagagcgaacaggaaatcggaaaggcaacagcaaagtacttcttctacagcaacatcatgaacttcttcaagacagaaatcacactggcaaacggagaaatcagaaagagaccgctgatcgaaacaaacggagaaacaggagaaatcgtctgggacaagggaagagacttcgcaacagtcagaaaggtcctgagcatgccgcaggtcaacatcgtcaagaagacagaagtccagacaggaggattcagcaaggaaagcatcctgccgaagagaaacagcgacaagctgatcgcaagaaagaaggactgggacccgaagaagtacggaggattcgacagcccgacagtcgcatacagcgtcctggtcgtcgcaaaggtcgaaaagggaaagagcaagaagctgaagagcgtcaaggaactgctgggaatcacaatcatggaaagaagcagcttcgaaaagaacccgatcgacttcctggaagcaaagggatacaaggaagtcaagaaggacctgatcatcaagctgccgaagtacagcctgttcgaactggaaaacggaagaaagagaatgctggcaagcgcaggagaactgcagaagggaaacgaactggcactgccgagcaagtacgtcaacttcctgtacctggcaagccactacgaaaagctgaagggaagcccggaagacaacgaacagaagcagctgttcgtcgaacagcacaagcactacctggacgaaatcatcgaacagatcagcgaattcagcaagagagtcatcctggcagacgcaaacctggacaaggtcctgagcgcatacaacaagcacagagacaagccgatcagagaacaggcagaaaacatcatccacctgttcacactgacaaacctgggagcaccggcagcattcaagtacttcgacacaacaatcgacagaaagagatacacaagcacaaaggaagtcctggacgcaacactgatccaccagagcatcacaggactgtacgaaacaagaatcgatctgagccagctgggaggagacagcggaggaagcacaaacctgagcgacatcatcgaaaaggaaacaggaaagcagctggtcatccaggaaagcatcctgatgctgccggaagaagtcgaagaagtcatcggaaacaagccggaaagcgacatcctggtccacacagcatacgacgaaagcacagacgaaaacgtcatgctgctgacaagcgacgcaccggaatacaagccgtgggcactggtcatccaggacagcaacggagaaaacaagatcaagatgctgagcggaggaagcccgaagaagaagagaaaggtctaatag

SEQ ID NO: 371 - RNA, 5055 nt, synthetic construct
  misc_feature 1..5055: note = Synthetic
  source 1..5055: mol_type = other RNA
atggaagcaagcccggcaagcggaccgagacacctgatggacccgcacatcttcacaagcaacttcaacaacggaatcggaagacacaagacatacctgtgctacgaagtcgaaagactggacaacggaacaagcgtcaagatggaccagcacagaggattcctgcacaaccaggcaaagaacctgctgtgcggattctacggaagacacgcagaactgagattcctggacctggtcccgagcctgcagctggacccggcacagatctacagagtcacatggttcatcagctggagcccgtgcttcagctggggatgcgcaggagaagtcagagcatttctgcaggaaaacacacacgtcagactgagaatcttcgcagcaagaatctacgactacgacccgctgtacaaggaagcactgcagatgctgagagacgcaggagcacaggtcagcatcatgacatacgacgaattcaagcactgctgggacacattcgtcgaccaccagggatgcccgttccagccgtgggacggactggacgaacacagccaggcactgagcggaagactgagagcaatcctgcagaaccagggaaacggcggcggcggcagcggaggaggaggaagcgaagccgccgccaaagaggccgccgccaaggacaagaagtacagcatcggactggccatcggaacaaacagcgtcggatgggcagtcatcacagacgaatacaaggtcccgagcaagaagttcaaggtcctgggaaacacagacagacacagcatcaagaagaacctgatcggagcactgctgttcgacagcggagaaacagcagaagcaacaagactgaagagaacagcaagaagaagatacacaagaagaaagaacagaatctgctacctgcaggaaatcttcagcaacgaaatggcaaaggtcgacgacagcttcttccacagactggaagaaagcttcctggtcgaagaagacaagaagcacgaaagacacccgatcttcggaaacatcgtcgacgaagtcgcataccacgaaaagtacccgacaatctaccacctgagaaagaagctggtcgacagcacagacaaggcagacctgagactgatctacctggcactggcacacatgatcaagttcagaggacacttcctgatcgaaggagacctgaacccggacaacagcgacgtcgacaagctgttcatccagctggtccagacatacaaccagctgttcgaagaaaacccgatcaacgcaagcggagtcgacgcaaaggcaatcctgagcgcaagactgagcaagagcagaagactggaaaacctgatcgcacagctgccgggagaaaagaagaacggactgttcggaaacctgatcgcactgagcctgggactgacaccgaacttcaagagcaacttcgacctggcagaagacgcaaagctgcagctgagcaaggacacatacgacgacgacctggacaacctgctggcacagatcggagaccagtacgcagacctgttcctggcagcaaagaacctgagcgacgcaatcctgctgagcgacatcctgagagtcaacacagaaatcacaaaggcaccgctgagcgcaagcatgatcaagagatacgacgaacaccaccaggacctgacactgctgaaggcactggtcagacagcagctgccggaaaagtacaaggaaatcttcttcgaccagagcaagaacggatacgcaggatacatcgacggaggagcaagccaggaagaattctacaagttcatcaagccgatcctggaaaagatggacggaacagaagaactgctggtcaagctgaacagagaagacctgctgagaaagcagagaacattcgacaacggaagcatcccgcaccagatccacctgggagaactgcacgcaatcctgagaagacaggaagacttctacccgttcctgaaggacaacagagaaaagatcgaaaagatcctgacattcagaatcccgtactacgtcggaccgctggcaagaggaaacagcagattcgcatggatgacaagaaagagcgaagaaacaatcacaccgtggaacttcgaagaagtcgtcgacaagggagcaagcgcacagagcttcatcgaaagaatgacaaacttcgacaagaacctgccgaacgaaaaggtcctgccgaagcacagcctgctgtacgaatacttcacagtctacaacgaactgacaaaggtcaagtacgtcacagaaggaatgagaaagccggcattcctgagcggagaacagaagaaggcaatcgtcgacctgctgttcaagacaaacagaaaggtcacagtcaagcagctgaaggaagactacttcaagaagatcgaatgcttcgacagcgtcgaaatcagcggagtcgaagacagattcaacgcaagcctgggaacataccacgacctgctgaagatcatcaaggacaaggacttcctggacaacgaagaaaacgaagacatcctggaagacatcgtcctgacactgacactgttcgaagacagagaaatgatcgaagaaagactgaagacatacgcacacctgttcgacgacaaggtcatgaagcagctgaagagaagaagatacacaggatggggaagactgagcagaaagctgatcaacggaatcagagacaagcagagcggaaagacaatcctggacttcctgaagagcgacggattcgcaaacagaaacttcatgcagctgatccacgacgacagcctgacattcaaggaagacatccagaaggcacaggtcagcggacagggagacagcctgcacgaacacatcgcaaacctggcaggaagcccggcaatcaagaagggaatcctgcagacagtcaaggtcgtcgacgaactggtcaaggtcatgggaagacacaagccggaaaacatcgtcatcgaaatggcaagagaaaaccagacaacacagaagggacagaagaacagcagagaaagaatgaagagaatcgaagaaggaatcaaggaactgggaagccagatcctgaaggaacacccggtcgaaaacacacagctgcagaacgaaaagctgtacctgtactacctgcagaacggaagagacatgtacgtcgaccaggaactggacatcaacagactgagcgactacgacgtcgaccacatcgtcccgcagagcttcctgaaggacgacagcatcgacaacaaggtcctgacaagaagcgacaagaacagaggaaagagcgacaacgtcccgagcgaagaagtcgtcaagaagatgaagaactactggagacagctgctgaacgcaaagctgatcacacagagaaagttcgacaacctgacaaaggcagagagaggaggactgagcgaactggacaaggcaggattcatcaagagacagctggtcgaaacaagacagatcacaaagcacgtcgcacagatcctggacagcagaatgaacacaaagtacgacgaaaacgacaagctgatcagagaagtcaaggtcatcacactgaagagcaagctggtcagcgacttcagaaaggacttccagttctacaaggtcagagaaatcaacaactaccaccacgcacacgacgcatacctgaacgcagtcgtcggaacagcactgatcaagaagtacccgaagctggaaagcgaattcgtctacggagactacaaggtctacgacgtcagaaagatgatcgcaaagagcgaacaggaaatcggaaaggcaacagcaaagtacttcttctacagcaacatcatgaacttcttcaagacagaaatcacactggcaaacggagaaatcagaaagagaccgctgatcgaaacaaacggagaaacaggagaaatcgtctgggacaagggaagagacttcgcaacagtcagaaaggtcctgagcatgccgcaggtcaacatcgtcaagaagacagaagtccagacaggaggattcagcaaggaaagcatcctgccgaagagaaacagcgacaagctgatcgcaagaaagaaggactgggacccgaagaagtacggaggattcgacagcccgacagtcgcatacagcgtcctggtcgtcgcaaaggtcgaaaagggaaagagcaagaagctgaagagcgtcaaggaactgctgggaatcacaatcatggaaagaagcagcttcgaaaagaacccgatcgacttcctggaagcaaagggatacaaggaagtcaagaaggacctgatcatcaagctgccgaagtacagcctgttcgaactggaaaacggaagaaagagaatgctggcaagcgcaggagaactgcagaagggaaacgaactggcactgccgagcaagtacgtcaacttcctgtacctggcaagccactacgaaaagctgaagggaagcccggaagacaacgaacagaagcagctgttcgtcgaacagcacaagcactacctggacgaaatcatcgaacagatcagcgaattcagcaagagagtcatcctggcagacgcaaacctggacaaggtcctgagcgcatacaacaagcacagagacaagccgatcagagaacaggcagaaaacatcatccacctgttcacactgacaaacctgggagcaccggcagcattcaagtacttcgacacaacaatcgacagaaagagatacacaagcacaaaggaagtcctggacgcaacactgatccaccagagcatcacaggactgtacgaaacaagaatcgatctgagccagctgggaggagacagcggaggaagcacaaacctgagcgacatcatcgaaaaggaaacaggaaagcagctggtcatccaggaaagcatcctgatgctgccggaagaagtcgaagaagtcatcggaaacaagccggaaagcgacatcctggtccacacagcatacgacgaaagcacagacgaaaacgtcatgctgctgacaagcgacgcaccggaatacaagccgtgggcactggtcatccaggacagcaacggagaaaacaagatcaagatgctgagcggaggaagcccgaagaagaagagaaaggtctaa

SEQ ID NO: 372 - RNA, 5055 nt, synthetic construct
  misc_feature 1..5055: note = Synthetic
  source 1..5055: mol_type = other RNA
atggaagcaagcccggcaagcggaccgagacacctgatggacccgcacatcttcacaagcaacttcaacaacggaatcggaagacacaagacatacctgtgctacgaagtcgaaagactggacaacggaacaagcgtcaagatggaccagcacagaggattcctgcacaaccaggcaaagaacctgctgtgcggattctacggaagacacgcagaactgagattcctggacctggtcccgagcctgcagctggacccggcacagatctacagagtcacatggttcatcagctggagcccgtgcttcagctggggatgcgcaggagaagtcagagcatttctgcaggaaaacacacacgtcagactgagaatcttcgcagcaagaatctacgactacgacccgctgtacaaggaagcactgcagatgctgagagacgcaggagcacaggtcagcatcatgacatacgacgaattcaagcactgctgggacacattcgtcgaccaccagggatgcccgttccagccgtgggacggactggacgaacacagccaggcactgagcggaagactgagagcaatcctgcagaaccagggaaacggcggcggcggaagcgaggccgctgccaaaggcggaggaggaagcggaggaggcggcagcgacaagaagtacagcatcggactggccatcggaacaaacagcgtcggatgggcagtcatcacagacgaatacaaggtcccgagcaagaagttcaaggtcctgggaaacacagacagacacagcatcaagaagaacctgatcggagcactgctgttcgacagcggagaaacagcagaagcaacaagactgaagagaacagcaagaagaagatacacaagaagaaagaacagaatctgctacctgcaggaaatcttcagcaacgaaatggcaaaggtcgacgacagcttcttccacagactggaagaaagcttcctggtcgaagaagacaagaagcacgaaagacacccgatcttcggaaacatcgtcgacgaagtcgcataccacgaaaagtacccgacaatctaccacctgagaaagaagctggtcgacagcacagacaaggcagacctgagactgatctacctggcactggcacacatgatcaagttcagaggacacttcctgatcgaaggagacctgaacccggacaacagcgacgtcgacaagctgttcatccagctggtccagacatacaaccagctgttcgaagaaaacccgatcaacgcaagcggagtcgacgcaaaggcaatcctgagcgcaagactgagcaagagcagaagactggaaaacctgatcgcacagctgccgggagaaaagaagaacggactgttcggaaacctgatcgcactgagcctgggactgacaccgaacttcaagagcaacttcgacctggcagaagacgcaaagctgcagctgagcaaggacacatacgacgacgacctggacaacctgctggcacagatcggagaccagtacgcagacctgttcctggcagcaaagaacctgagcgacgcaatcctgctgagcgacatcctgagagtcaacacagaaatcacaaaggcaccgctgagcgcaagcatgatcaagagatacgacgaacaccaccaggacctgacactgctgaaggcactggtcagacagcagctgccggaaaagtacaaggaaatcttcttcgaccagagcaagaacggatacgcaggatacatcgacggaggagcaagccaggaagaattctacaagttcatcaagccgatcctggaaaagatggacggaacagaagaactgctggtcaagctgaacagagaagacctgctgagaaagcagagaacattcgacaacggaagcatcccgcaccagatccacctgggagaactgcacgcaatcctgagaagacaggaagacttctacccgttcctgaaggacaacagagaaaagatcgaaaagatcctgacattcagaatcccgtactacgtcggaccgctggcaagaggaaacagcagattcgcatggatgacaagaaagagcgaagaaacaatcacaccgtggaacttcgaagaagtcgtcgacaagggagcaagcgcacagagcttcatcgaaagaatgacaaacttcgacaagaacctgccgaacgaaaaggtcctgccgaagcacagcctgctgtacgaatacttcacagtctacaacgaactgacaaaggtcaagtacgtcacagaaggaatgagaaagccggcattcctgagcggagaacagaagaaggcaatcgtcgacctgctgttcaagacaaacagaaaggtcacagtcaagcagctgaaggaagactacttcaagaagatcgaatgcttcgacagcgtcgaaatcagcggagtcgaagacagattcaacgcaagcctgggaacataccacgacctgctgaagatcatcaaggacaaggacttcctggacaacgaagaaaacgaagacatcctggaagacatcgtcctgacactgacactgttcgaagacagagaaatgatcgaagaaagactgaagacatacgcacacctgttcgacgacaaggtcatgaagcagctgaagagaagaagatacacaggatggggaagactgagcagaaagctgatcaacggaatcagagacaagcagagcggaaagacaatcctggacttcctgaagagcgacggattcgcaaacagaaacttcatgcagctgatccacgacgacagcctgacattcaaggaagacatccagaaggcacaggtcagcggacagggagacagcctgcacgaacacatcgcaaacctggcaggaagcccggcaatcaagaagggaatcctgcagacagtcaaggtcgtcgacgaactggtcaaggtcatgggaagacacaagccggaaaacatcgtcatcgaaatggcaagagaaaaccagacaacacagaagggacagaagaacagcagagaaagaatgaagagaatcgaagaaggaatcaaggaactgggaagccagatcctgaaggaacacccggtcgaaaacacacagctgcagaacgaaaagctgtacctgtactacctgcagaacggaagagacatgtacgtcgaccaggaactggacatcaacagactgagcgactacgacgtcgaccacatcgtcccgcagagcttcctgaaggacgacagcatcgacaacaaggtcctgacaagaagcgacaagaacagaggaaagagcgacaacgtcccgagcgaagaagtcgtcaagaagatgaagaactactggagacagctgctgaacgcaaagctgatcacacagagaaagttcgacaacctgacaaaggcagagagaggaggactgagcgaactggacaaggcaggattcatcaagagacagctggtcgaaacaagacagatcacaaagcacgtcgcacagatcctggacagcagaatgaacacaaagtacgacgaaaacgacaagctgatcagagaagtcaaggtcatcacactgaagagcaagctggtcagcgacttcagaaaggacttccagttctacaaggtcagagaaatcaacaactaccaccacgcacacgacgcatacctgaacgcagtcgtcggaacagcactgatcaagaagtacccgaagctggaaagcgaattcgtctacggagactacaaggtctacgacgtcagaaagatgatcgcaaagagcgaacaggaaatcggaaaggcaacagcaaagtacttcttctacagcaacatcatgaacttcttcaagacagaaatcacactggcaaacggagaaatcagaaagagaccgctgatcgaaacaaacggagaaacaggagaaatcgtctgggacaagggaagagacttcgcaacagtcagaaaggtcctgagcatgccgcaggtcaacatcgtcaagaagacagaagtccagacaggaggattcagcaaggaaagcatcctgccgaagagaaacagcgacaagctgatcgcaagaaagaaggactgggacccgaagaagtacggaggattcgacagcccgacagtcgcatacagcgtcctggtcgtcgcaaaggtcgaaaagggaaagagcaagaagctgaagagcgtcaaggaactgctgggaatcacaatcatggaaagaagcagcttcgaaaagaacccgatcgacttcctggaagcaaagggatacaaggaagtcaagaaggacctgatcatcaagctgccgaagtacagcctgttcgaactggaaaacggaagaaagagaatgctggcaagcgcaggagaactgcagaagggaaacgaactggcactgccgagcaagtacgtcaacttcctgtacctggcaagccactacgaaaagctgaagggaagcccggaagacaacgaacagaagcagctgttcgtcgaacagcacaagcactacctggacgaaatcatcgaacagatcagcgaattcagcaagagagtcatcctggcagacgcaaacctggacaaggtcctgagcgcatacaacaagcacagagacaagccgatcagagaacaggcagaaaacatcatccacctgttcacactgacaaacctgggagcaccggcagcattcaagtacttcgacacaacaatcgacagaaagagatacacaagcacaaaggaagtcctggacgcaacactgatccaccagagcatcacaggactgtacgaaacaagaatcgatctgagccagctgggaggagacagcggaggaagcacaaacctgagcgacatcatcgaaaaggaaacaggaaagcagctggtcatccaggaaagcatcctgatgctgccggaagaagtcgaagaagtcatcggaaacaagccggaaagcgacatcctggtccacacagcatacgacgaaagcacagacgaaaacgtcatgctgctgacaagcgacgcaccggaatacaagccgtgggcactggtcatccaggacagcaacggagaaaacaagatcaagatgctgagcggaggaagcccgaagaagaagagaaaggtctaa

SEQ ID NO: 373 - RNA, 5055 nt, synthetic construct
  misc_feature 1..5055: note = Synthetic
  source 1..5055: mol_type = other RNA
atggaagcaagcccggcaagcggaccgagacacctgatggacccgcacatcttcacaagcaacttcaacaacggaatcggaagacacaagacatacctgtgctacgaagtcgaaagactggacaacggaacaagcgtcaagatggaccagcacagaggattcctgcacaaccaggcaaagaacctgctgtgcggattctacggaagacacgcagaactgagattcctggacctggtcccgagcctgcagctggacccggcacagatctacagagtcacatggttcatcagctggagcccgtgcttcagctggggatgcgcaggagaagtcagagcatttctgcaggaaaacacacacgtcagactgagaatcttcgcagcaagaatctacgactacgacccgctgtacaaggaagcactgcagatgctgagagacgcaggagcacaggtcagcatcatgacatacgacgaattcaagcactgctgggacacattcgtcgaccaccagggatgcccgttccagccgtgggacggactggacgaacacagccaggcactgagcggaagactgagagcaatcctgcagaaccagggaaacgaggccgccgccaaggaggccgccgccaaggaggccgccgccaaggaggccgccgccaaggacaagaagtacagcatcggactggccatcggaacaaacagcgtcggatgggcagtcatcacagacgaatacaaggtcccgagcaagaagttcaaggtcctgggaaacacagacagacacagcatcaagaagaacctgatcggagcactgctgttcgacagcggagaaacagcagaagcaacaagactgaagagaacagcaagaagaagatacacaagaagaaagaacagaatctgctacctgcaggaaatcttcagcaacgaaatggcaaaggtcgacgacagcttcttccacagactggaagaaagcttcctggtcgaagaagacaagaagcacgaaagacacccgatcttcggaaacatcgtcgacgaagtcgcataccacgaaaagtacccgacaatctaccacctgagaaagaagctggtcgacagcacagacaaggcagacctgagactgatctacctggcactggcacacatgatcaagttcagaggacacttcctgatcgaaggagacctgaacccggacaacagcgacgtcgacaagctgttcatccagctggtccagacatacaaccagctgttcgaagaaaacccgatcaacgcaagcggagtcgacgcaaaggcaatcctgagcgcaagactgagcaagagcagaagactggaaaacctgatcgcacagctgccgggagaaaagaagaacggactgttcggaaacctgatcgcactgagcctgggactgacaccgaacttcaagagcaacttcgacctggcagaagacgcaaagctgcagctgagcaaggacacatacgacgacgacctggacaacctgctggcacagatcggagaccagtacgcagacctgttcctggcagcaaagaacctgagcgacgcaatcctgctgagcgacatcctgagagtcaacacagaaatcacaaaggcaccgctgagcgcaagcatgatcaagagatacgacgaacaccaccaggacctgacactgctgaaggcactggtcagacagcagctgccggaaaagtacaaggaaatcttcttcgaccagagcaagaacggatacgcaggatacatcgacggaggagcaagccaggaagaattctacaagttcatcaagccgatcctggaaaagatggacggaacagaagaactgctggtcaagctgaacagagaagacctgctgagaaagcagagaacattcgacaacggaagcatcccgcaccagatccacctgggagaactgcacgcaatcctgagaagacaggaagacttctacccgttcctgaaggacaacagagaaaagatcgaaaagatcctgacattcagaatcccgtactacgtcggaccgctggcaagaggaaacagcagattcgcatggatgacaagaaagagcgaagaaacaatcacaccgtggaacttcgaagaagtcgtcgacaagggagcaagcgcacagagcttcatcgaaagaatgacaaacttcgacaagaacctgccgaacgaaaaggtcctgccgaagcacagcctgctgtacgaatacttcacagtctacaacgaactgacaaaggtcaagtacgtcacagaaggaatgagaaagccggcattcctgagcggagaacagaagaaggcaatcgtcgacctgctgttcaagacaaacagaaaggtcacagtcaagcagctgaaggaagactacttcaagaagatcgaatgcttcgacagcgtcgaaatcagcggagtcgaagacagattcaacgcaagcctgggaacataccacgacctgctgaagatcatcaaggacaaggacttcctggacaacgaagaaaacgaagacatcctggaagacatcgtcctgacactgacactgttcgaagacagagaaatgatcgaagaaagactgaagacatacgcacacctgttcgacgacaaggtcatgaagcagctgaagagaagaagatacacaggatggggaagactgagcagaaagctgatcaacggaatcagagacaagcagagcggaaagacaatcctggacttcctgaagagcgacggattcgcaaacagaaacttcatgcagctgatccacgacgacagcctgacattcaaggaagacatccagaaggcacaggtcagcggacagggagacagcctgcacgaacacatcgcaaacctggcaggaagcccggcaatcaagaagggaatcctgcagacagtcaaggtcgtcgacgaactggtcaaggtcatgggaagacacaagccggaaaacatcgtcatcgaaatggcaagagaaaaccagacaacacagaagggacagaagaacagcagagaaagaatgaagagaatcgaagaaggaatcaaggaactgggaagccagatcctgaaggaacacccggtcgaaaacacacagctgcagaacgaaaagctgtacctgtactacctgcagaacggaagagacatgtacgtcgaccaggaactggacatcaacagactgagcgactacgacgtcgaccacatcgtcccgcagagcttcctgaaggacgacagcatcgacaacaaggtcctgacaagaagcgacaagaacagaggaaagagcgacaacgtcccgagcgaagaagtcgtcaagaagatgaagaactactggagacagctgctgaacgcaaagctgatcacacagagaaagttcgacaacctgacaaaggcagagagaggaggactgagcgaactggacaaggcaggattcatcaagagacagctggtcgaaacaagacagatcacaaagcacgtcgcacagatcctggacagcagaatgaacacaaagtacgacgaaaacgacaagctgatcagagaagtcaaggtcatcacactgaagagcaagctggtcagcgacttcagaaaggacttccagttctacaaggtcagagaaatcaacaactaccaccacgcacacgacgcatacctgaacgcagtcgtcggaacagcactgatcaagaagtacccgaagctggaaagcgaattcgtctacggagactacaaggtctacgacgtcagaaagatgatcgcaaagagcgaacaggaaatcggaaaggcaacagcaaagtacttcttctacagcaacatcatgaacttcttcaagacagaaatcacactggcaaacggagaaatcagaaagagaccgctgatcgaaacaaacggagaaacaggagaaatcgtctgggacaagggaagagacttcgcaacagtcagaaaggtcctgagcatgccgcaggtcaacatcgtcaagaagacagaagtccagacaggaggattcagcaaggaaagcatcctgccgaagagaaacagcgacaagctgatcgcaagaaagaaggactgggacccgaagaagtacggaggattcgacagcccgacagtcgcatacagcgtcctggtcgtcgcaaaggtcgaaaagggaaagagcaagaagctgaagagcgtcaaggaactgctgggaatcacaatcatggaaagaagcagcttcgaaaagaacccgatcgacttcctggaagcaaagggatacaaggaagtcaagaaggacctgatcatcaagctgccgaagtacagcctgttcgaactggaaaacggaagaaagagaatgctggcaagcgcaggagaactgcagaagggaaacgaactggcactgccgagcaagtacgtcaacttcctgtacctggcaagccactacgaaaagctgaagggaagcccggaagacaacgaacagaagcagctgttcgtcgaacagcacaagcactacctggacgaaatcatcgaacagatcagcgaattcagcaagagagtcatcctggcagacgcaaacctggacaaggtcctgagcgcatacaacaagcacagagacaagccgatcagagaacaggcagaaaacatcatccacctgttcacactgacaaacctgggagcaccggcagcattcaagtacttcgacacaacaatcgacagaaagagatacacaagcacaaaggaagtcctggacgcaacactgatccaccagagcatcacaggactgtacgaaacaagaatcgatctgagccagctgggaggagacagcggaggaagcacaaacctgagcgacatcatcgaaaaggaaacaggaaagcagctggtcatccaggaaagcatcctgatgctgccggaagaagtcgaagaagtcatcggaaacaagccggaaagcgacatcctggtccacacagcatacgacgaaagcacagacgaaaacgtcatgctgctgacaagcgacgcaccggaatacaagccgtgggcactggtcatccaggacagcaacggagaaaacaagatcaagatgctgagcggaggaagcccgaagaagaagagaaaggtctaa

SEQ ID NO: 374 - RNA, 5070 nt, synthetic construct
  misc_feature 1..5070: note = Synthetic
  source 1..5070: mol_type = other RNA
atggaagcaagcccggcaagcggaccgagacacctgatggacccgcacatcttcacaagcaacttcaacaacggaatcggaagacacaagacatacctgtgctacgaagtcgaaagactggacaacggaacaagcgtcaagatggaccagcacagaggattcctgcacaaccaggcaaagaacctgctgtgcggattctacggaagacacgcagaactgagattcctggacctggtcccgagcctgcagctggacccggcacagatctacagagtcacatggttcatcagctggagcccgtgcttcagctggggatgcgcaggagaagtcagagcatttctgcaggaaaacacacacgtcagactgagaatcttcgcagcaagaatctacgactacgacccgctgtacaaggaagcactgcagatgctgagagacgcaggagcacaggtcagcatcatgacatacgacgaattcaagcactgctgggacacattcgtcgaccaccagggatgcccgttccagccgtgggacggactggacgaacacagccaggcactgagcggaagactgagagcaatcctgcagaaccagggaaacggaggaggaggaagcgaagccgccgccaaagaggccgccgccaagggaggcggcggcagcgaggccgccgccaaggacaagaagtacagcatcggactggccatcggaacaaacagcgtcggatgggcagtcatcacagacgaatacaaggtcccgagcaagaagttcaaggtcctgggaaacacagacagacacagcatcaagaagaacctgatcggagcactgctgttcgacagcggagaaacagcagaagcaacaagactgaagagaacagcaagaagaagatacacaagaagaaagaacagaatctgctacctgcaggaaatcttcagcaacgaaatggcaaaggtcgacgacagcttcttccacagactggaagaaagcttcctggtcgaagaagacaagaagcacgaaagacacccgatcttcggaaacatcgtcgacgaagtcgcataccacgaaaagtacccgacaatctaccacctgagaaagaagctggtcgacagcacagacaaggcagacctgagactgatctacctggcactggcacacatgatcaagttcagaggacacttcctgatcgaaggagacctgaacccggacaacagcgacgtcgacaagctgttcatccagctggtccagacatacaaccagctgttcgaagaaaacccgatcaacgcaagcggagtcgacgcaaaggcaatcctgagcgcaagactgagcaagagcagaagactggaaaacctgatcgcacagctgccgggagaaaagaagaacggactgttcggaaacctgatcgcactgagcctgggactgacaccgaacttcaagagcaacttcgacctggcagaagacgcaaagctgcagctgagcaaggacacatacgacgacgacctggacaacctgctggcacagatcggagaccagtacgcagacctgttcctggcagcaaagaacctgagcgacgcaatcctgctgagcgacatcctgagagtcaacacagaaatcacaaaggcaccgctgagcgcaagcatgatcaagagatacgacgaacaccaccaggacctgacactgctgaaggcactggtcagacagcagctgccggaaaagtacaaggaaatcttcttcgaccagagcaagaacggatacgcaggatacatcgacggaggagcaagccaggaagaattctacaagttcatcaagccgatcctggaaaagatggacggaacagaagaactgctggtcaagctgaacagagaagacctgctgagaaagcagagaacattcgacaacggaagcatcccgcaccagatccacctgggagaactgcacgcaatcctgagaagacaggaagacttctacccgttcctgaaggacaacagagaaaagatcgaaaagatcctgacattcagaatcccgtactacgtcggaccgctggcaagaggaaacagcagattcgcatggatgacaagaaagagcgaagaaacaatcacaccgtggaacttcgaagaagtcgtcgacaagggagcaagcgcacagagcttcatcgaaagaatgacaaacttcgacaagaacctgccgaacgaaaaggtcctgccgaagcacagcctgctgtacgaatacttcacagtctacaacgaactgacaaaggtcaagtacgtcacagaaggaatgagaaagccggcattcctgagcggagaacagaagaaggcaatcgtcgacctgctgttcaagacaaacagaaaggtcacagtcaagcagctgaaggaagactacttcaagaagatcgaatgcttcgacagcgtcgaaatcagcggagtcgaagacagattcaacgcaagcctgggaacataccacgacctgctgaagatcatcaaggacaaggacttcctggacaacgaagaaaacgaagacatcctggaagacatcgtcctgacactgacactgttcgaagacagagaaatgatcgaagaaagactgaagacatacgcacacctgttcgacgacaaggtcatgaagcagctgaagagaagaagatacacaggatggggaagactgagcagaaagctgatcaacggaatcagagacaagcagagcggaaagacaatcctggacttcctgaagagcgacggattcgcaaacagaaacttcatgcagctgatccacgacgacagcctgacattcaaggaagacatccagaaggcacaggtcagcggacagggagacagcctgcacgaacacatcgcaaacctggcaggaagcccggcaatcaagaagggaatcctgcagacagtcaaggtcgtcgacgaactggtcaaggtcatgggaagacacaagccggaaaacatcgtcatcgaaatggcaagagaaaaccagacaacacagaagggacagaagaacagcagagaaagaatgaagagaatcgaagaaggaatcaaggaactgggaagccagatcctgaaggaacacccggtcgaaaacacacagctgcagaacgaaaagctgtacctgtactacctgcagaacggaagagacatgtacgtcgaccaggaactggacatcaacagactgagcgactacgacgtcgaccacatcgtcccgcagagcttcctgaaggacgacagcatcgacaacaaggtcctgacaagaagcgacaagaacagaggaaagagcgacaacgtcccgagcgaagaagtcgtcaagaagatgaagaactactggagacagctgctgaacgcaaagctgatcacacagagaaagttcgacaacctgacaaaggcagagagaggaggactgagcgaactggacaaggcaggattcatcaagagacagctggtcgaaacaagacagatcacaaagcacgtcgcacagatcctggacagcagaatgaacacaaagtacgacgaaaacgacaagctgatcagagaagtcaaggtcatcacactgaagagcaagctggtcagcgacttcagaaaggacttccagttctacaaggtcagagaaatcaacaactaccaccacgcacacgacgcatacctgaacgcagtcgtcggaacagcactgatcaagaagtacccgaagctggaaagcgaattcgtctacggagactacaaggtctacgacgtcagaaagatgatcgcaaagagcgaacaggaaatcggaaaggcaacagcaaagtacttcttctacagcaacatcatgaacttcttcaagacagaaatcacactggcaaacggagaaatcagaaagagaccgctgatcgaaacaaacggagaaacaggagaaatcgtctgggacaagggaagagacttcgcaacagtcagaaaggtcctgagcatgccgcaggtcaacatcgtcaagaagacagaagtccagacaggaggattcagcaaggaaagcatcctgccgaagagaaacagcgacaagctgatcgcaagaaagaaggactgggacccgaagaagtacggaggattcgacagcccgacagtcgcatacagcgtcctggtcgtcgcaaaggtcgaaaagggaaagagcaagaagctgaagagcgtcaaggaactgctgggaatcacaatcatggaaagaagcagcttcgaaaagaacccgatcgacttcctggaagcaaagggatacaaggaagtcaagaaggacctgatcatcaagctgccgaagtacagcctgttcgaactggaaaacggaagaaagagaatgctggcaagcgcaggagaactgcagaagggaaacgaactggcactgccgagcaagtacgtcaacttcctgtacctggcaagccactacgaaaagctgaagggaagcccggaagacaacgaacagaagcagctgttcgtcgaacagcacaagcactacctggacgaaatcatcgaacagatcagcgaattcagcaagagagtcatcctggcagacgcaaacctggacaaggtcctgagcgcatacaacaagcacagagacaagccgatcagagaacaggcagaaaacatcatccacctgttcacactgacaaacctgggagcaccggcagcattcaagtacttcgacacaacaatcgacagaaagagatacacaagcacaaaggaagtcctggacgcaacactgatccaccagagcatcacaggactgtacgaaacaagaatcgatctgagccagctgggaggagacagcggaggaagcacaaacctgagcgacatcatcgaaaaggaaacaggaaagcagctggtcatccaggaaagcatcctgatgctgccggaagaagtcgaagaagtcatcggaaacaagccggaaagcgacatcctggtccacacagcatacgacgaaagcacagacgaaaacgtcatgctgctgacaagcgacgcaccggaatacaagccgtgggcactggtcatccaggacagcaacggagaaaacaagatcaagatgctgagcggaggaagcccgaagaagaagagaaaggtctaa

SEQ ID NO: 375 - RNA, 5070 nt, synthetic construct
  misc_feature 1..5070: note = Synthetic
  source 1..5070: mol_type = other RNA
atggaagcaagcccggcaagcggaccgagacacctgatggacccgcacatcttcacaagcaacttcaacaacggaatcggaagacacaagacatacctgtgctacgaagtcgaaagactggacaacggaacaagcgtcaagatggaccagcacagaggattcctgcacaaccaggcaaagaacctgctgtgcggattctacggaagacacgcagaactgagattcctggacctggtcccgagcctgcagctggacccggcacagatctacagagtcacatggttcatcagctggagcccgtgcttcagctggggatgcgcaggagaagtcagagcatttctgcaggaaaacacacacgtcagactgagaatcttcgcagcaagaatctacgactacgacccgctgtacaaggaagcactgcagatgctgagagacgcaggagcacaggtcagcatcatgacatacgacgaattcaagcactgctgggacacattcgtcgaccaccagggatgcccgttccagccgtgggacggactggacgaacacagccaggcactgagcggaagactgagagcaatcctgcagaaccagggaaacgaggccgccgccaaggaggccgccgccaagggcggcggcggcagcggcggcggcggcagcggcggcggcggcagcgacaagaagtacagcatcggactggccatcggaacaaacagcgtcggatgggcagtcatcacagacgaatacaaggtcccgagcaagaagttcaaggtcctgggaaacacagacagacacagcatcaagaagaacctgatcggagcactgctgttcgacagcggagaaacagcagaagcaacaagactgaagagaacagcaagaagaagatacacaagaagaaagaacagaatctgctacctgcaggaaatcttcagcaacgaaatggcaaaggtcgacgacagcttcttccacagactggaagaaagcttcctggtcgaagaagacaagaagcacgaaagacacccgatcttcggaaacatcgtcgacgaagtcgcataccacgaaaagtacccgacaatctaccacctgagaaagaagctggtcgacagcacagacaaggcagacctgagactgatctacctggcactggcacacatgatcaagttcagaggacacttcctgatcgaaggagacctgaacccggacaacagcgacgtcgacaagctgttcatccagctggtccagacatacaaccagctgttcgaagaaaacccgatcaacgcaagcggagtcgacgcaaaggcaatcctgagcgcaagactgagcaagagcagaagactggaaaacctgatcgcacagctgccgggagaaaagaagaacggactgttcggaaacctgatcgcactgagcctgggactgacaccgaacttcaagagcaacttcgacctggcagaagacgcaaagctgcagctgagcaaggacacatacgacgacgacctggacaacctgctggcacagatcggagaccagtacgcagacctgttcctggcagcaaagaacctgagcgacgcaatcctgctgagcgacatcctgagagtcaacacagaaatcacaaaggcaccgctgagcgcaagcatgatcaagagatacgacgaacaccaccaggacctgacactgctgaaggcactggtcagacagcagctgccggaaaagtacaaggaaatcttcttcgaccagagcaagaacggatacgcaggatacatcgacggaggagcaagccaggaagaattctacaagttcatcaagccgatcctggaaaagatggacggaacagaagaactgctggtcaagctgaacagagaagacctgctgagaaagcagagaacattcgacaacggaagcatcccgcaccagatccacctgggagaactgcacgcaatcctgagaagacaggaagacttctacccgttcctgaaggacaacagagaaaagatcgaaaagatcctgacattcagaatcccgtactacgtcggaccgctggcaagaggaaacagcagattcgcatggatgacaagaaagagcgaagaaacaatcacaccgtggaacttcgaagaagtcgtcgacaagggagcaagcgcacagagcttcatcgaaagaatgacaaacttcgacaagaacctgccgaacgaaaaggtcctgccgaagcacagcctgctgtacgaatacttcacagtctacaacgaactgacaaaggtcaagtacgtcacagaaggaatgagaaagccggcattcctgagcggagaacagaagaaggcaatcgtcgacctgctgttcaagacaaacagaaaggtcacagtcaagcagctgaaggaagactacttcaagaagatcgaatgcttcgacagcgtcgaaatcagcggagtcgaagacagattcaacgcaagcctgggaacataccacgacctgctgaagatcatcaaggacaaggacttcctggacaacgaagaaaacgaagacatcctggaagacatcgtcctgacactgacactgttcgaagacagagaaatgatcgaagaaagactgaagacatacgcacacctgttcgacgacaaggtcatgaagcagctgaagagaagaagatacacaggatggggaagactgagcagaaagctgatcaacggaatcagagacaagcagagcggaaagacaatcctggacttcctgaagagcgacggattcgcaaacagaaacttcatgcagctgatccacgacgacagcctgacattcaaggaagacatccagaaggcacaggtcagcggacagggagacagcctgcacgaacacatcgcaaacctggcaggaagcccggcaatcaagaagggaatcctgcagacagtcaaggtcgtcgacgaactggtcaaggtcatgggaagacacaagccggaaaacatcgtcatcgaaatggcaagagaaaaccagacaacacagaagggacagaagaacagcagagaaagaatgaagagaatcgaagaaggaatcaaggaactgggaagccagatcctgaaggaacacccggtcgaaaacacacagctgcagaacgaaaagctgtacctgtactacctgcagaacggaagagacatgtacgtcgaccaggaactggacatcaacagactgagcgactacgacgtcgaccacatcgtcccgcagagcttcctgaaggacgacagcatcgacaacaaggtcctgacaagaagcgacaagaacagaggaaagagcgacaacgtcccgagcgaagaagtcgtcaagaagatgaagaactactggagacagctgctgaacgcaaagctgatcacacagagaaagttcgacaacctgacaaaggcagagagaggaggactgagcgaactggacaaggcaggattcatcaagagacagctggtcgaaacaagacagatcacaaagcacgtcgcacagatcctggacagcagaatgaacacaaagtacgacgaaaacgacaagctgatcagagaagtcaaggtcatcacactgaagagcaagctggtcagcgacttcagaaaggacttccagttctacaaggtcagagaaatcaacaactaccaccacgcacacgacgcatacctgaacgcagtcgtcggaacagcactgatcaagaagtacccgaagctggaaagcgaattcgtctacggagactacaaggtctacgacgtcagaaagatgatcgcaaagagcgaacaggaaatcggaaaggcaacagcaaagtacttcttctacagcaacatcatgaacttcttcaagacagaaatcacactggcaaacggagaaatcagaaagagaccgctgatcgaaacaaacggagaaacaggagaaatcgtctgggacaagggaagagacttcgcaacagtcagaaaggtcctgagcatgccgcaggtcaacatcgtcaagaagacagaagtccagacaggaggattcagcaaggaaagcatcctgccgaagagaaacagcgacaagctgatcgcaagaaagaaggactgggacccgaagaagtacggaggattcgacagcccgacagtcgcatacagcgtcctggtcgtcgcaaaggtcgaaaagggaaagagcaagaagctgaagagcgtcaaggaactgctgggaatcacaatcatggaaagaagcagcttcgaaaagaacccgatcgacttcctggaagcaaagggatacaaggaagtcaagaaggacctgatcatcaagctgccgaagtacagcctgttcgaactggaaaacggaagaaagagaatgctggcaagcgcaggagaactgcagaagggaaacgaactggcactgccgagcaagtacgtcaacttcctgtacctggcaagccactacgaaaagctgaagggaagcccggaagacaacgaacagaagcagctgttcgtcgaacagcacaagcactacctggacgaaatcatcgaacagatcagcgaattcagcaagagagtcatcctggcagacgcaaacctggacaaggtcctgagcgcatacaacaagcacagagacaagccgatcagagaacaggcagaaaacatcatccacctgttcacactgacaaacctgggagcaccggcagcattcaagtacttcgacacaacaatcgacagaaagagatacacaagcacaaaggaagtcctggacgcaacactgatccaccagagcatcacaggactgtacgaaacaagaatcgatctgagccagctgggaggagacagcggaggaagcacaaacctgagcgacatcatcgaaaaggaaacaggaaagcagctggtcatccaggaaagcatcctgatgctgccggaagaagtcgaagaagtcatcggaaacaagccggaaagcgacatcctggtccacacagcatacgacgaaagcacagacgaaaacgtcatgctgctgacaagcgacgcaccggaatacaagccgtgggcactggtcatccaggacagcaacggagaaaacaagatcaagatgctgagcggaggaagcccgaagaagaagagaaaggtctaa

SEQ ID NO: 376 - RNA, 5070 nt, synthetic construct
  misc_feature 1..5070: note = Synthetic
  source 1..5070: mol_type = other RNA
atggaagcaagcccggcaagcggaccgagacacctgatggacccgcacatcttcacaagcaacttcaacaacggaatcggaagacacaagacatacctgtgctacgaagtcgaaagactggacaacggaacaagcgtcaagatggaccagcacagaggattcctgcacaaccaggcaaagaacctgctgtgcggattctacggaagacacgcagaactgagattcctggacctggtcccgagcctgcagctggacccggcacagatctacagagtcacatggttcatcagctggagcccgtgcttcagctggggatgcgcaggagaagtcagagcatttctgcaggaaaacacacacgtcagactgagaatcttcgcagcaagaatctacgactacgacccgctgtacaaggaagcactgcagatgctgagagacgcaggagcacaggtcagcatcatgacatacgacgaattcaagcactgctgggacacattcgtcgaccaccagggatgcccgttccagccgtgggacggactggacgaacacagccaggcactgagcggaagactgagagcaatcctgcagaaccagggaaacgaagcagcagcaaaggaagcagcagcaaagggaggaggaggaagcggaggaggaggaagcgaagcagcagcaaaggacaagaagtacagcatcggactggccatcggaacaaacagcgtcggatgggcagtcatcacagacgaatacaaggtcccgagcaagaagttcaaggtcctgggaaacacagacagacacagcatcaagaagaacctgatcggagcactgctgttcgacagcggagaaacagcagaagcaacaagactgaagagaacagcaagaagaagatacacaagaagaaagaacagaatctgctacctgcaggaaatcttcagcaacgaaatggcaaaggtcgacgacagcttcttccacagactggaagaaagcttcctggtcgaagaagacaagaagcacgaaagacacccgatcttcggaaacatcgtcgacgaagtcgcataccacgaaaagtacccgacaatctaccacctgagaaagaagctggtcgacagcacagacaaggcagacctgagactgatctacctggcactggcacacatgatcaagttcagaggacacttcctgatcgaaggagacctgaacccggacaacagcgacgtcgacaagctgttcatccagctggtccagacatacaaccagctgttcgaagaaaacccgatcaacgcaagcggagtcgacgcaaaggcaatcctgagcgcaagactgagcaagagcagaagactggaaaacctgatcgcacagctgccgggagaaaagaagaacggactgttcggaaacctgatcgcactgagcctgggactgacaccgaacttcaagagcaacttcgacctggcagaagacgcaaagctgcagctgagcaaggacacatacgacgacgacctggacaacctgctggcacagatcggagaccagtacgcagacctgttcctggcagcaaagaacctgagcgacgcaatcctgctgagcgacatcctgagagtcaacacagaaatcacaaaggcaccgctgagcgcaagcatgatcaagagatacgacgaacaccaccaggacctgacactgctgaaggcactggtcagacagcagctgccggaaaagtacaaggaaatcttcttcgaccagagcaagaacggatacgcaggatacatcgacggaggagcaagccaggaagaattctacaagttcatcaagccgatcctggaaaagatggacggaacagaagaactgctggtcaagctgaacagagaagacctgctgagaaagcagagaacattcgacaacggaagcatcccgcaccagatccacctgggagaactgcacgcaatcctgagaagacaggaagacttctacccgttcctgaaggacaacagagaaaagatcgaaaagatcctgacattcagaatcccgtactacgtcggaccgctggcaagaggaaacagcagattcgcatggatgacaagaaagagcgaagaaacaatcacaccgtggaacttcgaagaagtcgtcgacaagggagcaagcgcacagagcttcatcgaaagaatgacaaacttcgacaagaacctgccgaacgaaaaggtcctgccgaagcacagcctgctgtacgaatacttcacagtctacaacgaactgacaaaggtcaagtacgtcacagaaggaatgagaaagccggcattcctgagcggagaacagaagaaggcaatcgtcgacctgctgttcaagacaaacagaaaggtcacagtcaagcagctgaaggaagactacttcaagaagatcgaatgcttcgacagcgtcgaaatcagcggagtcgaagacagattcaacgcaagcctgggaacataccacgacctgctgaagatcatcaaggacaaggacttcctggacaacgaagaaaacgaagacatcctggaagacatcgtcctgacactgacactgttcgaagacagagaaatgatcgaagaaagactgaagacatacgcacacctgttcgacgacaaggtcatgaagcagctgaagagaagaagatacacaggatggggaagactgagcagaaagctgatcaacggaatcagagacaagcagagcggaaagacaatcctggacttcctgaagagcgacggattcgcaaacagaaacttcatgcagctgatccacgacgacagcctgacattcaaggaagacatccagaaggcacaggtcagcggacagggagacagcctgcacgaacacatcgcaaacctggcaggaagcccggcaatcaagaagggaatcctgcagacagtcaaggtcgtcgacgaactggtcaaggtcatgggaagacacaagccggaaaacatcgtcatcgaaatggcaagagaaaaccagacaacacagaagggacagaagaacagcagagaaagaatgaagagaatcgaagaaggaatcaaggaactgggaagccagatcctgaaggaacacccggtcgaaaacacacagctgcagaacgaaaagctgtacctgtactacctgcagaacggaagagacatgtacgtcgaccaggaactggacatcaacagactgagcgactacgacgtcgaccacatcgtcccgcagagcttcctgaaggacgacagcatcgacaacaaggtcctgacaagaagcgacaagaacagaggaaagagcgacaacgtcccgagcgaagaagtcgtcaagaagatgaagaactactggagacagctgctgaacgcaaagctgatcacacagagaaagttcgacaacctgacaaaggcagagagaggaggactgagcgaactggacaaggcaggattcatcaagagacagctggtcgaaacaagacagatcacaaagcacgtcgcacagatcctggacagcagaatgaacacaaagtacgacgaaaacgacaagctgatcagagaagtcaaggtcatcacactgaagagcaagctggtcagcgacttcagaaaggacttccagttctacaaggtcagagaaatcaacaactaccaccacgcacacgacgcatacctgaacgcagtcgtcggaacagcactgatcaagaagtacccgaagctggaaagcgaattcgtctacggagactacaaggtctacgacgtcagaaagatgatcgcaaagagcgaacaggaaatcggaaaggcaacagcaaagtacttcttctacagcaacatcatgaacttcttcaagacagaaatcacactggcaaacggagaaatcagaaagagaccgctgatcgaaacaaacggagaaacaggagaaatcgtctgggacaagggaagagacttcgcaacagtcagaaaggtcctgagcatgccgcaggtcaacatcgtcaagaagacagaagtccagacaggaggattcagcaaggaaagcatcctgccgaagagaaacagcgacaagctgatcgcaagaaagaaggactgggacccgaagaagtacggaggattcgacagcccgacagtcgcatacagcgtcctggtcgtcgcaaaggtcgaaaagggaaagagcaagaagctgaagagcgtcaaggaactgctgggaatcacaatcatggaaagaagcagcttcgaaaagaacccgatcgacttcctggaagcaaagggatacaaggaagtcaagaaggacctgatcatcaagctgccgaagtacagcctgttcgaactggaaaacggaagaaagagaatgctggcaagcgcaggagaactgcagaagggaaacgaactggcactgccgagcaagtacgtcaacttcctgtacctggcaagccactacgaaaagctgaagggaagcccggaagacaacgaacagaagcagctgttcgtcgaacagcacaagcactacctggacgaaatcatcgaacagatcagcgaattcagcaagagagtcatcctggcagacgcaaacctggacaaggtcctgagcgcatacaacaagcacagagacaagccgatcagagaacaggcagaaaacatcatccacctgttcacactgacaaacctgggagcaccggcagcattcaagtacttcgacacaacaatcgacagaaagagatacacaagcacaaaggaagtcctggacgcaacactgatccaccagagcatcacaggactgtacgaaacaagaatcgatctgagccagctgggaggagacagcggaggaagcacaaacctgagcgacatcatcgaaaaggaaacaggaaagcagctggtcatccaggaaagcatcctgatgctgccggaagaagtcgaagaagtcatcggaaacaagccggaaagcgacatcctggtccacacagcatacgacgaaagcacagacgaaaacgtcatgctgctgacaagcgacgcaccggaatacaagccgtgggcactggtcatccaggacagcaacggagaaaacaagatcaagatgctgagcggaggaagcccgaagaagaagagaaaggtctaa

SEQ ID NO: 377 - RNA, 5070 nt, synthetic construct
  misc_feature 1..5070: note = Synthetic
  source 1..5070: mol_type = other RNA
atggaagcaagcccggcaagcggaccgagacacctgatggacccgcacatcttcacaagcaacttcaacaacggaatcggaagacacaagacatacctgtgctacgaagtcgaaagactggacaacggaacaagcgtcaagatggaccagcacagaggattcctgcacaaccaggcaaagaacctgctgtgcggattctacggaagacacgcagaactgagattcctggacctggtcccgagcctgcagctggacccggcacagatctacagagtcacatggttcatcagctggagcccgtgcttcagctggggatgcgcaggagaagtcagagcatttctgcaggaaaacacacacgtcagactgagaatcttcgcagcaagaatctacgactacgacccgctgtacaaggaagcactgcagatgctgagagacgcaggagcacaggtcagcatcatgacatacgacgaattcaagcactgctgggacacattcgtcgaccaccagggatgcccgttccagccgtgggacggactggacgaacacagccaggcactgagcggaagactgagagcaatcctgcagaaccagggaaacgaagcagcagcaaaggaagcagcagcaaaggaagcagcagcaaagggaggaggaggaagcggaggaggaggaagcgacaagaagtacagcatcggactggccatcggaacaaacagcgtcggatgggcagtcatcacagacgaatacaaggtcccgagcaagaagttcaaggtcctgggaaacacagacagacacagcatcaagaagaacctgatcggagcactgctgttcgacagcggagaaacagcagaagcaacaagactgaagagaacagcaagaagaagatacacaagaagaaagaacagaatctgctacctgcaggaaatcttcagcaacgaaatggcaaaggtcgacgacagcttcttccacagactggaagaaagcttcctggtcgaagaagacaagaagcacgaaagacacccgatcttcggaaacatcgtcgacgaagtcgcataccacgaaaagtacccgacaatctaccacctgagaaagaagctggtcgacagcacagacaaggcagacctgagactgatctacctggcactggcacacatgatcaagttcagaggacacttcctgatcgaaggagacctgaacccggacaacagcgacgtcgacaagctgttcatccagctggtccagacatacaaccagctgttcgaagaaaacccgatcaacgcaagcggagtcgacgcaaaggcaatcctgagcgcaagactgagcaagagcagaagactggaaaacctgatcgcacagctgccgggagaaaagaagaacggactgttcggaaacctgatcgcactgagcctgggactgacaccgaacttcaagagcaacttcgacctggcagaagacgcaaagctgcagctgagcaaggacacatacgacgacgacctggacaacctgctggcacagatcggagaccagtacgcagacctgttcctggcagcaaagaacctgagcgacgcaatcctgctgagcgacatcctgagagtcaacacagaaatcacaaaggcaccgctgagcgcaagcatgatcaagagatacgacgaacaccaccaggacctgacactgctgaaggcactggtcagacagcagctgccggaaaagtacaaggaaatcttcttcgaccagagcaagaacggatacgcaggatacatcgacggaggagcaagccaggaagaattctacaagttcatcaagccgatcctggaaaagatggacggaacagaagaactgctggtcaagctgaacagagaagacctgctgagaaagcagagaacattcgacaacggaagcatcccgcaccagatccacctgggagaactgcacgcaatcctgagaagacaggaagacttctacccgttcctgaaggacaacagagaaaagatcgaaaagatcctgacattcagaatcccgtactacgtcggaccgctggcaagaggaaacagcagattcgcatggatgacaagaaagagcgaagaaacaatcacaccgtggaacttcgaagaagtcgtcgacaagggagcaagcgcacagagcttcatcgaaagaatgacaaacttcgacaagaacctgccgaacgaaaaggtcctgccgaagcacagcctgctgtacgaatacttcacagtctacaacgaactgacaaaggtcaagtacgtcacagaaggaatgagaaagccggcattcctgagcggagaacagaagaaggcaatcgtcgacctgctgttcaagacaaacagaaaggtcacagtcaagcagctgaaggaagactacttcaagaagatcgaatgcttcgacagcgtcgaaatcagcggagtcgaagacagattcaacgcaagcctgggaacataccacgacctgctgaagatcatcaaggacaaggacttcctggacaacgaagaaaacgaagacatcctggaagacatcgtcctgacactgacactgttcgaagacagagaaatgatcgaagaaagactgaagacatacgcacacctgttcgacgacaaggtcatgaagcagctgaagagaagaagatacacaggatggggaagactgagcagaaagctgatcaacggaatcagagacaagcagagcggaaagacaatcctggacttcctgaagagcgacggattcgcaaacagaaacttcatgcagctgatccacgacgacagcctgacattcaaggaagacatccagaaggcacaggtcagcggacagggagacagcctgcacgaacacatcgcaaacctggcaggaagcccggcaatcaagaagggaatcctgcagacagtcaaggtcgtcgacgaactggtcaaggtcatgggaagacacaagccggaaaacatcgtcatcgaaatggcaagagaaaaccagacaacacagaagggacagaagaacagcagagaaagaatgaagagaatcgaagaaggaatcaaggaactgggaagccagatcctgaaggaacacccggtcgaaaacacacagctgcagaacgaaaagctgtacctgtactacctgcagaacggaagagacatgtacgtcgaccaggaactggacatcaacagactgagcgactacgacgtcgaccacatcgtcccgcagagcttcctgaaggacgacagcatcgacaacaaggtcctgacaagaagcgacaagaacagaggaaagagcgacaacgtcccgagcgaagaagtcgtcaagaagatgaagaactactggagacagctgctgaacgcaaagctgatcacacagagaaagttcgacaacctgacaaaggcagagagaggaggactgagcgaactggacaaggcaggattcatcaagagacagctggtcgaaacaagacagatcacaaagcacgtcgcacagatcctggacagcagaatgaacacaaagtacgacgaaaacgacaagctgatcagagaagtcaaggtcatcacactgaagagcaagctggtcagcgacttcagaaaggacttccagttctacaaggtcagagaaatcaacaactaccaccacgcacacgacgcatacctgaacgcagtcgtcggaacagcactgatcaagaagtacccgaagctggaaagcgaattcgtctacggagactacaaggtctacgacgtcagaaagatgatcgcaaagagcgaacaggaaatcggaaaggcaacagcaaagtacttcttctacagcaacatcatgaacttcttcaagacagaaatcacactggcaaacggagaaatcagaaagagaccgctgatcgaaacaaacggagaaacaggagaaatcgtctgggacaagggaagagacttcgcaacagtcagaaaggtcctgagcatgccgcaggtcaacatcgtcaagaagacagaagtccagacaggaggattcagcaaggaaagcatcctgccgaagagaaacagcgacaagctgatcgcaagaaagaaggactgggacccgaagaagtacggaggattcgacagcccgacagtcgcatacagcgtcctggtcgtcgcaaaggtcgaaaagggaaagagcaagaagctgaagagcgtcaaggaactgctgggaatcacaatcatggaaagaagcagcttcgaaaagaacccgatcgacttcctggaagcaaagggatacaaggaagtcaagaaggacctgatcatcaagctgccgaagtacagcctgttcgaactggaaaacggaagaaagagaatgctggcaagcgcaggagaactgcagaagggaaacgaactggcactgccgagcaagtacgtcaacttcctgtacctggcaagccactacgaaaagctgaagggaagcccggaagacaacgaacagaagcagctgttcgtcgaacagcacaagcactacctggacgaaatcatcgaacagatcagcgaattcagcaagagagtcatcctggcagacgcaaacctggacaaggtcctgagcgcatacaacaagcacagagacaagccgatcagagaacaggcagaaaacatcatccacctgttcacactgacaaacctgggagcaccggcagcattcaagtacttcgacacaacaatcgacagaaagagatacacaagcacaaaggaagtcctggacgcaacactgatccaccagagcatcacaggactgtacgaaacaagaatcgatctgagccagctgggaggagacagcggaggaagcacaaacctgagcgacatcatcgaaaaggaaacaggaaagcagctggtcatccaggaaagcatcctgatgctgccggaagaagtcgaagaagtcatcggaaacaagccggaaagcgacatcctggtccacacagcatacgacgaaagcacagacgaaaacgtcatgctgctgacaagcgacgcaccggaatacaagccgtgggcactggtcatccaggacagcaacggagaaaacaagatcaagatgctgagcggaggaagcccgaagaagaagagaaaggtctaa

SEQ ID NO: 378-386 - skipped (9 entries)

SEQ ID NO: 387 - protein, 1082 aa, synthetic construct
  REGION 1..1082: note = Synthetic
MAAFKPNPINYILGLAIGIASVGWAMVEIDEEENPIRLIDLGVRVFERAEVPKTGDSLAMARRLARSVRRLTRRRAHRLLRARRLLKREGVLQAADFDENGLIKSLPNTPWQLRAAALDRKLTPLEWSAVLLHLIKHRGYLSQRKNEGETADKELGALLKGVANNAHALQTGDFRTPAELALNKFEKESGHIRNQRGDYSHTFSRKDLQAELILLFEKQKEFGNPHVSGGLKEGIETLLMTQRPALSGDAVQKMLGHCTFEPAEPKAAKNTYTAERFIWLTKLNNLRILEQGSERPLTDTERATLMDEPYRKSKLTYAQARKLLGLEDTAFFKGLRYGKDNAEASTLMEMKAYHAISRALEKEGLKDKKSPLNLSSELQDEIGTAFSLFKTDEDITGRLKDRVQPEILEALLKHISFDKFVQISLKALRRIVPLMEQGKRYDEACAEIYGDHYGKKNTEEKIYLPPIPADEIRNPVVLRALSQARKVINGVVRRYGSPARIHIETAREVGKSFKDRKEIEKRQEENRKDREKAAAKFREYFPNFVGEPKSKDILKLRLYEQQHGKCLYSGKEINLVRLNEKGYVEIDHALPFSRTWDDSFNNKVLVLGSENQNKGNQTPYEYFNGKDNSREWQEFKARVETSRFPRSKKQRILLQKFDEDGFKECNLNDTRYVNRFLCQFVADHILLTGKGKRRVFASNGQITNLLRGFWGLRKVRAENDRHHALDAVVVACSTVAMQQKITRFVRYKEMNAFDGKTIDKETGKVLHQKTHFPQPWEFFAQEVMIRVFGKPDGKPEFEEADTPEKLRTLLAEKLSSRPEAVHEYVTPLFVSRAPNRKMSGAHKDTLRSAKRFVKHNEKISVKRVWLTEIKLADLENMVNYKNGREIELYEALKARLEAYGGNAKQAFDPKDNPFYKKGGQLVKAVRVEKTQESGVLLNKKNAYTIADNGDMVRVDVFCKVDKKGKNQYFIVPIYAWQVAENILPDIDCKGYRIDDSYTFCFSLHKYDLIAFQKDEKSKVEFAYYINCDSSNGRFYLAWHDKGSKEQQFRISTQNLVLIQKYQVNELGKEIRPCRLKKRPPVR

SEQ ID NO: 388 - DNA, 3243 bp, synthetic construct
  misc_feature 1..3243: note = Synthetic
  source 1..3243: mol_type = other DNA
gctgcttttaagcctaatcctattaattatattcttggtcttgctattggtattgcttctgttggttgggctatggttgagattgatgaggaggagaatcctattcgtcttattgatcttggtgttcgtgtttttgagcgtgctgaggttcctaagactggtgattctcttgctatggctcgtcgtcttgctcgttctgttcgtcgtcttactcgtcgtcgtgctcatcgtcttcttcgtgctcgtcgtcttcttaagcgtgagggtgttcttcaggctgctgattttgatgagaatggtcttattaagtctcttcctaatactccttggcagcttcgtgctgctgctcttgatcgtaagcttactcctcttgagtggtctgctgttcttcttcatcttattaagcatcgtggttatctttctcagcgtaagaatgagggtgagactgctgataaggagcttggtgctcttcttaagggtgttgctaataatgctcatgctcttcagactggtgattttcgtactcctgctgagcttgctcttaataagtttgagaaggagtctggtcatattcgtaatcagcgtggtgattattctcatactttttctcgtaaggatcttcaggctgagcttattcttctttttgagaagcagaaggagtttggtaatcctcatgtttctggtggtcttaaggagggtattgagactcttcttatgactcagcgtcctgctctttctggtgatgctgttcagaagatgcttggtcattgtacttttgagcctgctgagcctaaggctgctaagaatacttatactgctgagcgttttatttggcttactaagcttaataatcttcgtattcttgagcagggttctgagcgtcctcttactgatactgagcgtgctactcttatggatgagccttatcgtaagtctaagcttacttatgctcaggctcgtaagcttcttggtcttgaggatactgctttttttaagggtcttcgttatggtaaggataatgctgaggcttctactcttatggagatgaaggcttatcatgctatttctcgtgctcttgagaaggagggtcttaaggataagaagtctcctcttaatctttcttctgagcttcaggatgagattggtactgctttttctctttttaagactgatgaggatattactggtcgtcttaaggatcgtgttcagcctgagattcttgaggctcttcttaagcatatttcttttgataagtttgttcagatttctcttaaggctcttcgtcgtattgttcctcttatggagcagggtaagcgttatgatgaggcttgtgctgagatttatggtgatcattatggtaagaagaatactgaggagaagatttatcttcctcctattcctgctgatgagattcgtaatcctgttgttcttcgtgctctttctcaggctcgtaaggttattaatggtgttgttcgtcgttatggttctcctgctcgtattcatattgagactgctcgtgaggttggtaagtcttttaaggatcgtaaggagattgagaagcgtcaggaggagaatcgtaaggatcgtgagaaggctgctgctaagtttcgtgagtattttcctaattttgttggtgagcctaagtctaaggatattcttaagcttcgtctttatgagcagcagcatggtaagtgtctttattctggtaaggagattaatcttgttcgtcttaatgagaagggttatgttgagattgatcatgctcttcctttttctcgtacttgggatgattcttttaataataaggttcttgttcttggttctgagaatcagaataagggtaatcagactccttatgagtattttaatggtaaggataattctcgtgagtggcaggagtttaaggctcgtgttgagacttctcgttttcctcgttctaagaagcagcgtattcttcttcagaagtttgatgaggatggttttaaggagtgtaatcttaatgatactcgttatgttaatcgttttctttgtcagtttgttgctgatcatattcttcttactggtaagggtaagcgtcgtgtttttgcttctaatggtcagattactaatcttcttcgtggtttttggggtcttcgtaaggttcgtgctgagaatgatcgtcatcatgctcttgatgctgttgttgttgcttgttctactgttgctatgcagcagaagattactcgttttgttcgttataaggagatgaatgcttttgatggtaagactattgataaggagactggtaaggttcttcatcagaagactcattttcctcagccttgggagttttttgctcaggaggttatgattcgtgtttttggtaagcctgatggtaagcctgagtttgaggaggctgatactcctgagaagcttcgtactcttcttgctgagaagctttcttctcgtcctgaggctgttcatgagtatgttactcctctttttgtttctcgtgctcctaatcgtaagatgtctggtgctcataaggatactcttcgttctgctaagcgttttgttaagcataatgagaagatttctgttaagcgtgtttggcttactgagattaagcttgctgatcttgagaatatggttaattataagaatggtcgtgagattgagctttatgaggctcttaaggctcgtcttgaggcttatggtggtaatgctaagcaggcttttgatcctaaggataatcctttttataagaagggtggtcagcttgttaaggctgttcgtgttgagaagactcaggagtctggtgttcttcttaataagaagaatgcttatactattgctgataatggtgatatggttcgtgttgatgttttttgtaaggttgataagaagggtaagaatcagtattttattgttcctatttatgcttggcaggttgctgagaatattcttcctgatattgattgtaagggttatcgtattgatgattcttatactttttgtttttctcttcataagtatgatcttattgcttttcagaaggatgagaagtctaaggttgagtttgcttattatattaattgtgattcttctaatggtcgtttttatcttgcttggcatgataagggttctaaggagcagcagtttcgtatttctactcagaatcttgttcttattcagaagtatcaggttaatgagcttggtaaggagattcgtccttgtcgtcttaagaagcgtcctcctgttcgt

SEQ ID NO: 389 - DNA, 3243 bp, synthetic construct
  misc_feature 1..3243: note = Synthetic
  source 1..3243: mol_type = other DNA
gccgccttcaagcccaaccccatcaactacatcctgggcctggccatcggcatcgcctccgtgggctgggccatggtggagatcgacgaggaggagaaccccatccggctgatcgacctgggcgtgcgggtgttcgagcgggccgaggtgcccaagaccggcgactccctggccatggcccggcggctggcccggtccgtgcggcggctgacccggcggcgggcccaccggctgctgcgggcccggcggctgctgaagcgggagggcgtgctgcaggccgccgacttcgacgagaacggcctgatcaagtccctgcccaacaccccctggcagctgcgggccgccgccctggaccggaagctgacccccctggagtggtccgccgtgctgctgcacctgatcaagcaccggggctacctgtcccagcggaagaacgagggcgagaccgccgacaaggagctgggcgccctgctgaagggcgtggccaacaacgcccacgccctgcagaccggcgacttccggacccccgccgagctggccctgaacaagttcgagaaggagtccggccacatccggaaccagcggggcgactactcccacaccttctcccggaaggacctgcaggccgagctgatcctgctgttcgagaagcagaaggagttcggcaacccccacgtgtccggcggcctgaaggagggcatcgagaccctgctgatgacccagcggcccgccctgtccggcgacgccgtgcagaagatgctgggccactgcaccttcgagcccgccgagcccaaggccgccaagaacacctacaccgccgagcggttcatctggctgaccaagctgaacaacctgcggatcctggagcagggctccgagcggcccctgaccgacaccgagcgggccaccctgatggacgagccctaccggaagtccaagctgacctacgcccaggcccggaagctgctgggcctggaggacaccgccttcttcaagggcctgcggtacggcaaggacaacgccgaggcctccaccctgatggagatgaaggcctaccacgccatctcccgggccctggagaaggagggcctgaaggacaagaagtcccccctgaacctgtcctccgagctgcaggacgagatcggcaccgccttctccctgttcaagaccgacgaggacatcaccggccggctgaaggaccgggtgcagcccgagatcctggaggccctgctgaagcacatctccttcgacaagttcgtgcagatctccctgaaggccctgcggcggatcgtgcccctgatggagcagggcaagcggtacgacgaggcctgcgccgagatctacggcgaccactacggcaagaagaacaccgaggagaagatctacctgccccccatccccgccgacgagatccggaaccccgtggtgctgcgggccctgtcccaggcccggaaggtgatcaacggcgtggtgcggcggtacggctcccccgcccggatccacatcgagaccgcccgggaggtgggcaagtccttcaaggaccggaaggagatcgagaagcggcaggaggagaaccggaaggaccgggagaaggccgccgccaagttccgggagtacttccccaacttcgtgggcgagcccaagtccaaggacatcctgaagctgcggctgtacgagcagcagcacggcaagtgcctgtactccggcaaggagatcaacctggtgcggctgaacgagaagggctacgtggagatcgaccacgccctgcccttctcccggacctgggacgactccttcaacaacaaggtgctggtgctgggctccgagaaccagaacaagggcaaccagaccccctacgagtacttcaacggcaaggacaactcccgggagtggcaggagttcaaggcccgggtggagacctcccggttcccccggtccaagaagcagcggatcctgctgcagaagttcgacgaggacggcttcaaggagtgcaacctgaacgacacccggtacgtgaaccggttcctgtgccagttcgtggccgaccacatcctgctgaccggcaagggcaagcggcgggtgttcgcctccaacggccagatcaccaacctgctgcggggcttctggggcctgcggaaggtgcgggccgagaacgaccggcaccacgccctggacgccgtggtggtggcctgctccaccgtggccatgcagcagaagatcacccggttcgtgcggtacaaggagatgaacgccttcgacggcaagaccatcgacaaggagaccggcaaggtgctgcaccagaagacccacttcccccagccctgggagttcttcgcccaggaggtgatgatccgggtgttcggcaagcccgacggcaagcccgagttcgaggaggccgacacccccgagaagctgcggaccctgctggccgagaagctgtcctcccggcccgaggccgtgcacgagtacgtgacccccctgttcgtgtcccgggcccccaaccggaagatgtccggcgcccacaaggacaccctgcggtccgccaagcggttcgtgaagcacaacgagaagatctccgtgaagcgggtgtggctgaccgagatcaagctggccgacctggagaacatggtgaactacaagaacggccgggagatcgagctgtacgaggccctgaaggcccggctggaggcctacggcggcaacgccaagcaggccttcgaccccaaggacaaccccttctacaagaagggcggccagctggtgaaggccgtgcgggtggagaagacccaggagtccggcgtgctgctgaacaagaagaacgcctacaccatcgccgacaacggcgacatggtgcgggtggacgtgttctgcaaggtggacaagaagggcaagaaccagtacttcatcgtgcccatctacgcctggcaggtggccgagaacatcctgcccgacatcgactgcaagggctaccggatcgacgactcctacaccttctgcttctccctgcacaagtacgacctgatcgccttccagaaggacgagaagtccaaggtggagttcgcctactacatcaactgcgactcctccaacggccggttctacctggcctggcacgacaagggctccaaggagcagcagttccggatctccacccagaacctggtgctgatccagaagtaccaggtgaacgagctgggcaaggagatccggccctgccggctgaagaagcggccccccgtgcgg

SEQ ID NO: 390 - DNA, 3243 bp, synthetic construct; identical to SEQ ID NO: 389
  misc_feature 1..3243: note = Synthetic
  source 1..3243: mol_type = other DNA

SEQ ID NO: 391 - RNA, 3249 nt, synthetic construct
  modified_base 2: mod_base = OTHER; note = thymine
  modified_base 6: mod_base = OTHER; note = thymine
  modified_base 9..12: mod_base = OTHER; note = thymine
  modified_base 18: mod_base = OTHER; note = thymine
  modified_base 21: mod_base = OTHER; note = thymine
  modified_base 24: mod_base = OTHER; note = thymine
  modified_base 26..27: mod_base = OTHER; note = thymine
  modified_base 30..31: mod_base = OTHER; note = thymine
  modified_base 33: mod_base = OTHER; note = thymine
  modified_base 35..36: mod_base = OTHER; note = thymine
  modified_base 38..39: mod_base = OTHER; note = thymine
  modified_base 42: mod_base = OTHER; note = thymine
  modified_base 44..45: mod_base = OTHER; note = thymine
  modified_base 48: mod_base = OTHER; note = thymine
  modified_base 50..51: mod_base = OTHER; note = thymine
  modified_base 54: mod_base = OTHER; note = thymine
  modified_base 56..57: mod_base = OTHER; note = thymine
  modified_base 60..61: mod_base = OTHER; note = thymine
  modified_base 63: mod_base = OTHER; note = thymine
  modified_base 65..66: mod_base = OTHER; note = thymine
  modified_base 69..70: mod_base = OTHER; note = thymine
  modified_base 75: mod_base = OTHER; note = thymine
  modified_base 77: mod_base = OTHER; note = thymine
  modified_base 80..81: mod_base = OTHER; note = thymine
  modified_base 86..87: mod_base = OTHER; note = thymine
  modified_base 90: mod_base = OTHER; note = thymine
  modified_base 102: mod_base = OTHER; note = thymine
  modified_base 105: mod_base = OTHER; note = thymine
  modified_base 107..108: mod_base = OTHER; note = thymine
  modified_base 111: mod_base = OTHER; note = thymine
  modified_base 113..114: mod_base = OTHER; note = thymine
  modified_base 116..117: mod_base = OTHER; note = thymine
  modified_base 120: mod_base = OTHER; note = thymine
  modified_base 122..123: mod_base = OTHER; note = thymine
  modified_base 126: mod_base = OTHER; note = thymine
  modified_base 128..129: mod_base = OTHER; note = thymine
  modified_base 132: mod_base = OTHER; note = thymine
  modified_base 134..138: mod_base = OTHER; note = thymine
  modified_base 144: mod_base = OTHER; note = thymine
  modified_base 147: mod_base = OTHER; note = thymine
  modified_base 152..153: mod_base = OTHER; note = thymine
  modified_base 156: mod_base = OTHER; note = thymine
  modified_base 162: mod_base = OTHER; note = thymine
  modified_base 165: mod_base = OTHER; note = thymine
  modified_base 168..169: mod_base = OTHER; note = thymine
  modified_base 171: mod_base = OTHER; note = thymine
  modified_base 173..174: mod_base = OTHER; note = thymine
  modified_base 177: mod_base = OTHER; note = thymine
  modified_base 179: mod_base = OTHER; note = thymine
  modified_base 183: mod_base = OTHER; note = thymine
  modified_base 186: mod_base = OTHER; note = thymine
  modified_base 189: mod_base = OTHER; note = thymine
  modified_base 191..192: mod_base = OTHER; note = thymine
  modified_base 195: mod_base = OTHER; note = thymine
  modified_base 198..199: mod_base = OTHER; note = thymine
  modified_base 201: mod_base = OTHER; note = thymine
  modified_base 203..204: mod_base = OTHER; note = thymine
  modified_base 207: mod_base = OTHER; note = thymine
  modified_base 210: mod_base = OTHER; note = thymine
  modified_base 212..213: mod_base = OTHER; note = thymine
  modified_base 216: mod_base = OTHER; note = thymine
  modified_base 219: mod_base = OTHER; note = thymine
  modified_base 222: mod_base = OTHER; note = thymine
  modified_base 225: mod_base = OTHER; note = thymine
  modified_base 228: mod_base = OTHER; note = thymine
  modified_base 231: mod_base = OTHER; note = thymine
  modified_base 234: mod_base = OTHER; note = thymine
  modified_base 236..237: mod_base = OTHER; note = thymine
  modified_base 239..240: mod_base = OTHER; note = thymine
  modified_base 243: mod_base = OTHER; note = thymine
  modified_base 246: mod_base = OTHER; note = thymine
  modified_base 249: mod_base = OTHER; note = thymine
  modified_base 252: mod_base = OTHER; note = thymine
  modified_base 254..255: mod_base = OTHER; note = thymine
  modified_base 257..258: mod_base = OTHER; note = thymine
  modified_base 264: mod_base = OTHER; note = thymine
  modified_base 270: mod_base = OTHER; note = thymine
  modified_base 272..273: mod_base = OTHER; note = thymine
  modified_base 275..276: mod_base = OTHER; note = thymine
  modified_base 282: mod_base = OTHER; note = thymine
  modified_base 285: mod_base = OTHER; note = thymine
  modified_base 288..291: mod_base = OTHER; note = thymine
  modified_base 294: mod_base = OTHER; note = thymine
  modified_base 300: mod_base = OTHER; note = thymine
  modified_base 303: mod_base = OTHER; note = thymine
  modified_base 305..306: mod_base = OTHER; note = thymine
  modified_base 308..309: mod_base = OTHER; note = thymine
  modified_base 313: mod_base = OTHER; note = thymine
  modified_base 315: mod_base = OTHER; note = thymine
  modified_base 317..318: mod_base = OTHER; note = thymine
  modified_base 321: mod_base = OTHER; note = thymine
  modified_base 324: mod_base = OTHER; note = thymine
  modified_base 327: mod_base = OTHER; note = thymine
  modified_base 330..331: mod_base = OTHER; note = thymine
  modified_base 338..339: mod_base = OTHER; note = thymine
  modified_base 342: mod_base = OTHER; note = thymine
  modified_base 345: mod_base = OTHER; note = thymine
  modified_base 348: mod_base = OTHER; note = thymine
  modified_base 351: mod_base = OTHER; note = thymine
  modified_base 353..354: mod_base = OTHER; note = thymine
  modified_base 357: mod_base = OTHER; note = thymine
  modified_base 360: mod_base = OTHER; note = thymine
  modified_base 365..366: mod_base = OTHER; note = thymine
  modified_base 369: mod_base = OTHER; note = thymine
  modified_base 372: mod_base = OTHER; note = thymine
  modified_base 374..375: mod_base = OTHER; note = thymine
  modified_base 379: mod_base = OTHER; note = thymine
  modified_base 382: mod_base = OTHER; note = thymine
  modified_base 384: mod_base = OTHER; note = thymine
  modified_base 387: mod_base = OTHER; note = thymine
  modified_base 389..390: mod_base = OTHER; note = thymine
  modified_base 392..393: mod_base = OTHER; note = thymine
  modified_base 395..396: mod_base = OTHER; note = thymine
  modified_base 399: mod_base = OTHER; note = thymine
  modified_base 401..402: mod_base = OTHER; note = thymine
  modified_base 404..405: mod_base = OTHER; note = thymine
  modified_base 411: mod_base = OTHER; note = thymine
  modified_base 414: mod_base = OTHER; note = thymine
  modified_base 417..418: mod_base = OTHER; note = thymine
  modified_base 420: mod_base = OTHER; note = thymine
  modified_base 422..424: mod_base = OTHER; note = thymine
  modified_base 426: mod_base = OTHER; note = thymine
  modified_base 432: mod_base = OTHER; note = thymine
  modified_base 438: mod_base = OTHER; note = thymine
  modified_base 444: mod_base = OTHER; note = thymine
  modified_base 450: mod_base = OTHER; note = thymine
  modified_base 453: mod_base = OTHER; note = thymine
  modified_base 456: mod_base = OTHER; note = thymine
  modified_base 464..465: mod_base = OTHER; note = thymine
  modified_base 468: mod_base = OTHER; note = thymine
  modified_base 471: mod_base = OTHER; note = thymine
  modified_base 473..474: mod_base = OTHER; note = thymine
  modified_base 476..477: mod_base = OTHER; note = thymine
  modified_base 483: mod_base = OTHER; note = thymine
  modified_base 485..486: mod_base = OTHER; note = thymine
  modified_base 489: mod_base = OTHER; note = thymine
  modified_base 492: mod_base = OTHER; note = thymine
  modified_base 495: mod_base = OTHER; note = thymine
  modified_base 498: mod_base = OTHER; note = thymine
  modified_base 501: mod_base = OTHER; note = thymine
  modified_base 504: mod_base = OTHER; note = thymine
  modified_base 506..507: mod_base = OTHER; note = thymine
  modified_base 513: mod_base = OTHER; note = thymine
  modified_base 516: mod_base = OTHER; note = thymine
  modified_base 519..522: mod_base = OTHER; note = thymine
  modified_base 525: mod_base = OTHER; note = thymine
  modified_base 528: mod_base = OTHER; note = thymine
  modified_base 531: mod_base = OTHER; note = thymine
  modified_base 534: mod_base = OTHER; note = thymine
  modified_base 539..540: mod_base = OTHER; note = thymine
  modified_base 543: mod_base = OTHER; note = thymine
  modified_base 545..546: mod_base = OTHER; note = thymine
  modified_base 549: mod_base = OTHER; note = thymine
  modified_base 553..555: mod_base = OTHER; note = thymine
  modified_base 565: mod_base = OTHER; note = thymine
  modified_base 567: mod_base = OTHER; note = thymine
  modified_base 570: mod_base = OTHER; note = thymine
  modified_base 573: mod_base = OTHER; note = thymine
  modified_base 575..576: mod_base = OTHER; note = thymine
  modified_base 579: mod_base = OTHER; note = thymine
  modified_base 582: mod_base = OTHER; note = thymine
  modified_base 588: mod_base = OTHER; note = thymine
  modified_base 591: mod_base = OTHER; note = thymine
  modified_base 594..595: mod_base = OTHER; note = thymine
  modified_base 597..598: mod_base = OTHER; note = thymine
  modified_base 600: mod_base = OTHER; note = thymine
  modified_base 603: mod_base = OTHER; note = thymine
  modified_base 606..610: mod_base = OTHER; note = thymine
  modified_base 612: mod_base = OTHER; note = thymine
  modified_base 615: mod_base = OTHER; note = thymine
  modified_base 621: mod_base = OTHER; note = thymine
  modified_base 623..624: mod_base = OTHER; note = thymine
  modified_base 630: mod_base = OTHER; note = thymine
  modified_base 635..636: mod_base = OTHER; note = thymine
  modified_base 638..639: mod_base = OTHER; note = thymine
  modified_base 641..642: mod_base = OTHER; note = thymine
  modified_base 644..648: mod_base = OTHER; note = thymine
  modified_base 664..666: mod_base = OTHER; note = thymine
  modified_base 669: mod_base = OTHER; note = thymine
  modified_base 672: mod_base = OTHER; note = thymine
  modified_base 675: mod_base = OTHER; note = thymine
  modified_base 678: mod_base = OTHER; note = thymine
  modified_base 680..682: mod_base = OTHER; note = thymine
  modified_base 684: mod_base = OTHER; note = thymine
  modified_base 687: mod_base = OTHER; note = thymine
  modified_base 690: mod_base = OTHER; note = thymine
  modified_base 692..693: mod_base = OTHER; note = thymine
  modified_base 702: mod_base = OTHER; note = thymine
  modified_base 704..705: mod_base = OTHER; note = thymine
  modified_base 711: mod_base = OTHER; note = thymine
  modified_base 713..714: mod_base = OTHER; note = thymine
  modified_base 716..717: mod_base = OTHER; note = thymine
  modified_base 719: mod_base = OTHER; note = thymine
  modified_base 723: mod_base = OTHER; note = thymine
  modified_base 729: mod_base = OTHER; note = thymine
  modified_base 732: mod_base = OTHER; note = thymine
  modified_base 735: mod_base = OTHER; note = thymine
  modified_base 737..739: mod_base = OTHER; note = thymine
  modified_base 741: mod_base = OTHER; note = thymine
  modified_base 744: mod_base = OTHER; note = thymine
  modified_base 747: mod_base = OTHER; note = thymine
  modified_base 750: mod_base = OTHER; note = thymine
  modified_base 752..753: mod_base = OTHER; note = thymine
  modified_base 761: mod_base = OTHER; note = thymine
  modified_base 764..765: mod_base = OTHER; note = thymine
  modified_base 768: mod_base = OTHER; note = thymine
  modified_base 771..772: mod_base = OTHER; note = thymine
  modified_base 774: mod_base = OTHER; note = thymine
  modified_base 777..780: mod_base = OTHER; note = thymine
  modified_base 786: mod_base = OTHER; note = thymine
  modified_base 789: mod_base = OTHER; note = thymine
  modified_base 795: mod_base = OTHER; note = thymine
  modified_base 801: mod_base = OTHER; note = thymine
  modified_base 804: mod_base = OTHER; note = thymine
  modified_base 810: mod_base = OTHER; note = thymine
  modified_base 813..814: mod_base = OTHER; note = thymine
  modified_base 816: mod_base = OTHER; note = thymine
  modified_base 819: mod_base = OTHER; note = thymine
  modified_base 822: mod_base = OTHER; note = thymine
  modified_base 828..831: mod_base = OTHER; note = thymine
  modified_base 833..835: mod_base = OTHER; note = thymine
  modified_base 839..840: mod_base = OTHER; note = thymine
  modified_base 843: mod_base = OTHER; note = thymine
  modified_base 848..849: mod_base = OTHER; note = thymine
  modified_base 852: mod_base = OTHER; note = thymine
  modified_base 855: mod_base = OTHER; note = thymine
  modified_base 857..858: mod_base = OTHER; note = thymine
  modified_base 861: mod_base = OTHER; note = thymine
  modified_base 863..864: mod_base = OTHER; note = thymine
  modified_base 866..867: mod_base = OTHER; note = thymine
  modified_base 876..877: mod_base = OTHER; note = thymine
  modified_base 879: mod_base = OTHER; note = thymine
  modified_base 885: mod_base = OTHER; note = thymine
  modified_base 888: mod_base = OTHER; note = thymine
  modified_base 890..891: mod_base = OTHER; note = thymine
  modified_base 894: mod_base = OTHER; note = thymine
  modified_base 897: mod_base = OTHER; note = thymine
  modified_base 900: mod_base = OTHER; note = thymine
  modified_base 906: mod_base = OTHER; note = thymine
  modified_base 909: mod_base = OTHER; note = thymine
  modified_base 912: mod_base = OTHER; note = thymine
  modified_base 914..915: mod_base = OTHER; note = thymine
  modified_base 917: mod_base = OTHER; note = thymine
  modified_base 921: mod_base = OTHER; note = thymine
  modified_base 927..928: mod_base = OTHER; note = thymine
  modified_base 930: mod_base = OTHER; note = thymine
  modified_base 933: mod_base = OTHER; note = thymine
  modified_base 937: mod_base = OTHER; note = thymine
  modified_base 939: mod_base = OTHER; note = thymine
  modified_base 944..945: mod_base = OTHER; note = thymine
  modified_base 948..949: mod_base = OTHER; note = thymine
  modified_base 951: mod_base = OTHER; note = thymine
  modified_base 954: mod_base = OTHER; note = thymine
  modified_base 960: mod_base = OTHER; note = thymine
  modified_base 963: mod_base = OTHER; note = thymine
  modified_base 968..969: mod_base = OTHER; note = thymine
  modified_base 971..972: mod_base = OTHER; note = thymine
  modified_base 975: mod_base = OTHER; note = thymine
  modified_base 977..978: mod_base = OTHER; note = thymine
  modified_base 984: mod_base = OTHER; note = thymine
  modified_base 987: mod_base = OTHER; note = thymine
  modified_base 990..996: mod_base = OTHER; note = thymine
  modified_base 1002: mod_base = OTHER; note = thymine
  modified_base 1004..1005: mod_base = OTHER; note = thymine
  modified_base 1008..1009: mod_base = OTHER; note = thymine
  modified_base 1011: mod_base = OTHER; note = thymine
  modified_base 1014: mod_base = OTHER; note = thymine
  modified_base 1020: mod_base = OTHER; note = thymine
  modified_base 1023: mod_base = OTHER; note = thymine
  modified_base 1026: mod_base = OTHER; note = thymine
  modified_base 1032..1033: mod_base = OTHER; note = thymine
  modified_base 1035: mod_base = OTHER; note = thymine
  modified_base 1038: mod_base = OTHER; note = thymine
  modified_base 1040..1041: mod_base = OTHER; note = thymine
  modified_base 1043: mod_base = OTHER; note = thymine
  modified_base 1049: mod_base = OTHER; note = thymine
  modified_base 1056..1057: mod_base = OTHER; note = thymine
  modified_base 1059: mod_base = OTHER; note = thymine
  modified_base 1062: mod_base = OTHER; note = thymine
  modified_base 1065: mod_base = OTHER; note = thymine
  modified_base 1067..1069: mod_base = OTHER; note = thymine
  modified_base 1071: mod_base = OTHER; note = thymine
  modified_base 1074: mod_base = OTHER; note = thymine
  modified_base 1077: mod_base = OTHER; note = thymine
  modified_base 1079..1080: mod_base = OTHER; note = thymine
  modified_base 1092: mod_base = OTHER; note = thymine
  modified_base 1094..1095: mod_base = OTHER; note = thymine
  modified_base 1101: mod_base = OTHER; note = thymine
  modified_base 1108: mod_base = OTHER; note = thymine
  modified_base 1110: mod_base = OTHER; note = thymine
  modified_base 1113: mod_base = OTHER; note = thymine
  modified_base 1115..1116: mod_base = OTHER; note = thymine
  modified_base 1119: mod_base = OTHER; note = thymine
  modified_base 1121..1123: mod_base = OTHER; note = thymine
  modified_base 1125..1126: mod_base = OTHER; note = thymine
  modified_base 1128: mod_base = OTHER; note = thymine
  modified_base 1133..1134: mod_base = OTHER; note = thymine
  modified_base 1140: mod_base = OTHER; note = thymine
  modified_base 1145..1146: mod_base = OTHER; note = thymine
  modified_base 1149: mod_base = OTHER; note = thymine
  modified_base 1152: mod_base = OTHER; note = thymine
  modified_base 1155..1159: mod_base = OTHER; note = thymine
  modified_base 1161: mod_base = OTHER; note = thymine
  modified_base 1163..1167: mod_base = OTHER; note = thymine
  modified_base 1173: mod_base = OTHER; note = thymine
  modified_base 1176: mod_base = OTHER; note = thymine
  modified_base 1182: mod_base = OTHER; note = thymine
  modified_base 1184..1185: mod_base = OTHER; note = thymine
  modified_base 1188: mod_base = OTHER; note = thymine
  modified_base 1191: mod_base = OTHER; note = thymine
  modified_base 1194: mod_base = OTHER; note = thymine
  modified_base 1196..1197: mod_base = OTHER; note = thymine
  modified_base 1203: mod_base = OTHER; note = thymine
  modified_base 1206: mod_base = OTHER; note = thymine
  modified_base 1208..1209: mod_base = OTHER; note = thymine
  modified_base 1215: mod_base = OTHER; note = thymine
  modified_base 1220..1221: mod_base = OTHER; note = thymine
  modified_base 1223..1224: mod_base = OTHER; note = thymine
  modified_base 1230: mod_base = OTHER; note = thymine
  modified_base 1232..1233: mod_base = OTHER; note = thymine
  modified_base 1235..1236: mod_base = OTHER; note = thymine
  modified_base 1242: mod_base = OTHER; note = thymine
  modified_base 1244..1246: mod_base = OTHER; note = thymine
  modified_base 1248..1251: mod_base = OTHER; note = thymine
  modified_base 1254: mod_base = OTHER; note = thymine
  modified_base 1258..1260: mod_base = OTHER; note = thymine
  modified_base 1262..1263: mod_base = OTHER; note = thymine
  modified_base 1268..1270: mod_base = OTHER; note = thymine
  modified_base 1272: mod_base = OTHER; note = thymine
  modified_base 1274..1275: mod_base = OTHER; note = thymine
  modified_base 1281: mod_base = OTHER; note = thymine
  modified_base 1283..1284: mod_base = OTHER; note = thymine
  modified_base 1287: mod_base = OTHER; note = thymine
  modified_base 1290: mod_base = OTHER; note = thymine
  modified_base 1292..1293: mod_base = OTHER; note = thymine
  modified_base 1295..1296: mod_base = OTHER; note = thymine
  modified_base 1299: mod_base = OTHER; note = thymine
  modified_base 1301..1302: mod_base = OTHER; note = thymine
  modified_base 1304: mod_base = OTHER; note = thymine
  modified_base 1314: mod_base = OTHER; note = thymine
  modified_base 1320..1321: mod_base = OTHER; note = thymine
  modified_base 1323: mod_base = OTHER; note = thymine
  modified_base 1326: mod_base = OTHER; note = thymine
  modified_base 1332..1333: mod_base = OTHER; note = thymine
  modified_base 1335: mod_base = OTHER; note = thymine
  modified_base 1338: mod_base = OTHER; note = thymine
  modified_base 1343..1345: mod_base = OTHER; note = thymine
  modified_base 1347: mod_base = OTHER; note = thymine
  modified_base 1350: mod_base = OTHER; note = thymine
  modified_base 1353: mod_base = OTHER; note = thymine
  modified_base 1356..1357: mod_base = OTHER; note = thymine
  modified_base 1359: mod_base = OTHER; note = thymine
  modified_base 1362: mod_base = OTHER; note = thymine
  modified_base 1371: mod_base = OTHER; note = thymine
  modified_base 1374: mod_base = OTHER; note = thymine
  modified_base 1385..1387: mod_base = OTHER; note = thymine
  modified_base 1389: mod_base = OTHER; note = thymine
  modified_base 1391..1392: mod_base = OTHER; note = thymine
  modified_base 1395: mod_base = OTHER; note = thymine
  modified_base 1398: mod_base = OTHER; note = thymine
  modified_base 1400..1401: mod_base = OTHER; note = thymine
  modified_base 1404: mod_base = OTHER; note = thymine
  modified_base 1407: mod_base = OTHER; note = thymine
  modified_base 1410: mod_base = OTHER; note = thymine
  modified_base 1415..1416: mod_base = OTHER; note = thymine
  modified_base 1419: mod_base = OTHER; note = thymine
  modified_base 1422: mod_base = OTHER; note = thymine
  modified_base 1425: mod_base = OTHER; note = thymine
  modified_base 1427..1428: mod_base = OTHER; note = thymine
  modified_base 1430..1431: mod_base = OTHER; note = thymine
  modified_base 1433..1434: mod_base = OTHER; note = thymine
  modified_base 1437: mod_base = OTHER; note = thymine
  modified_base 1440: mod_base = OTHER; note = thymine
  modified_base 1442..1444: mod_base = OTHER; note = thymine
  modified_base 1446: mod_base = OTHER; note = thymine
  modified_base 1452: mod_base = OTHER; note = thymine
  modified_base 1455: mod_base = OTHER; note = thymine
  modified_base 1460..1461: mod_base = OTHER; note = thymine
  modified_base 1463..1464: mod_base = OTHER; note = thymine
  modified_base 1467: mod_base = OTHER; note = thymine
  modified_base 1470: mod_base = OTHER; note = thymine
  modified_base 1472..1473: mod_base = OTHER; note = thymine
  modified_base 1475..1476: mod_base = OTHER; note = thymine
  modified_base 1479: mod_base = OTHER; note = thymine
  modified_base 1482..1483: mod_base = OTHER; note = thymine
  modified_base 1485: mod_base = OTHER; note = thymine
  modified_base 1488..1489: mod_base = OTHER; note = thymine
  modified_base 1491: mod_base = OTHER; note = thymine
  modified_base 1494: mod_base = OTHER; note = thymine
  modified_base 1497: mod_base = OTHER; note = thymine
  modified_base 1500: mod_base = OTHER; note = thymine
  modified_base 1502..1503: mod_base = OTHER; note = thymine
  modified_base 1506: mod_base = OTHER; note = thymine
  modified_base 1508..1509: mod_base = OTHER; note = thymine
  modified_base 1515: mod_base = OTHER; note = thymine
  modified_base 1518: mod_base = OTHER; note = thymine
  modified_base 1521: mod_base = OTHER; note = thymine
  modified_base 1526..1527: mod_base = OTHER; note = thymine
  modified_base 1530: mod_base = OTHER; note = thymine
  modified_base 1534: mod_base = OTHER; note = thymine
  modified_base 1536..1539: mod_base = OTHER; note = thymine
  modified_base 1545: mod_base = OTHER; note = thymine
  modified_base 1548: mod_base = OTHER; note = thymine
  modified_base 1556..1557: mod_base = OTHER; note = thymine
  modified_base 1566: mod_base = OTHER; note = thymine
  modified_base 1578: mod_base = OTHER; note = thymine
  modified_base 1581: mod_base = OTHER; note = thymine
  modified_base 1587: mod_base = OTHER; note = thymine
  modified_base 1590: mod_base = OTHER; note = thymine
  modified_base 1599: mod_base = OTHER; note = thymine
  modified_base 1602: mod_base = OTHER; note = thymine
  modified_base 1605: mod_base = OTHER; note = thymine
  modified_base 1609..1611: mod_base = OTHER; note = thymine
  modified_base 1614: mod_base = OTHER; note = thymine
  modified_base 1618: mod_base = OTHER; note = thymine
  modified_base 1620..1623: mod_base = OTHER; note = thymine
  modified_base 1626: mod_base = OTHER; note = thymine
  modified_base 1629..1632: mod_base = OTHER; note = thymine
  modified_base 1634..1635: mod_base = OTHER; note = thymine
  modified_base 1638: mod_base = OTHER; note = thymine
  modified_base 1644: mod_base = OTHER; note = thymine
  modified_base 1648: mod_base = OTHER; note = thymine
  modified_base 1650: mod_base = OTHER; note = thymine
  modified_base 1656: mod_base = OTHER; note = thymine
  modified_base 1658..1659: mod_base = OTHER; note = thymine
  modified_base 1661..1662: mod_base = OTHER; note = thymine
  modified_base 1667..1668: mod_base = OTHER; note = thymine
  modified_base 1671: mod_base = OTHER; note = thymine
  modified_base 1673..1675: mod_base = OTHER; note = thymine
  modified_base 1677: mod_base = OTHER; note = thymine
  modified_base 1689: mod_base = OTHER; note = thymine
  modified_base 1692: mod_base = OTHER; note = thymine
  modified_base 1696: mod_base = OTHER; note = thymine
  modified_base 1698: mod_base = OTHER; note = thymine
  modified_base 1700..1702: mod_base = OTHER; note = thymine
  modified_base 1704..1705: mod_base = OTHER; note = thymine
  modified_base 1707: mod_base = OTHER; note = thymine
  modified_base 1710: mod_base = OTHER; note = thymine
  modified_base 1718..1719: mod_base = OTHER; note = thymine
  modified_base 1722: mod_base = OTHER; note = thymine
  modified_base 1724..1725: mod_base = OTHER; note = thymine
  modified_base 1727..1728: mod_base = OTHER; note = thymine
  modified_base 1731: mod_base = OTHER; note = thymine
  modified_base 1733..1734: mod_base = OTHER; note = thymine
  modified_base 1737: mod_base = OTHER; note = thymine
  modified_base 1746..1747: mod_base = OTHER; note = thymine
  modified_base 1749: mod_base = OTHER; note = thymine
  modified_base 1751..1752: mod_base = OTHER; note = thymine
  modified_base 1757..1758: mod_base = OTHER; note = thymine
  modified_base 1761: mod_base = OTHER; note = thymine
  modified_base 1764: mod_base = OTHER; note = thymine
  modified_base 1767: mod_base = OTHER; note = thymine
  modified_base 1769..1770: mod_base = OTHER; note = thymine
  modified_base 1773..1777: mod_base = OTHER; note = thymine
  modified_base 1779: mod_base = OTHER; note = thymine
  modified_base 1782: mod_base = OTHER; note = thymine
  modified_base 1785..1786: mod_base = OTHER; note = thymine
  modified_base 1791: mod_base = OTHER; note = thymine
  modified_base 1794..1795: mod_base = OTHER; note = thymine
  modified_base 1797..1800: mod_base = OTHER; note = thymine
  modified_base 1803: mod_base = OTHER; note = thymine
  modified_base 1806: mod_base = OTHER; note = thymine
  modified_base 1811..1812: mod_base = OTHER; note = thymine
  modified_base 1814..1815: mod_base = OTHER; note = thymine
  modified_base 1817..1818: mod_base = OTHER; note = thymine
  modified_base 1820..1821: mod_base = OTHER; note = thymine
  modified_base 1824..1825: mod_base = OTHER; note = thymine
  modified_base 1827: mod_base = OTHER; note = thymine
  modified_base 1833: mod_base = OTHER; note = thymine
  modified_base 1839: mod_base = OTHER; note = thymine
  modified_base 1845: mod_base = OTHER; note = thymine
  modified_base 1848: mod_base = OTHER; note = thymine
  modified_base 1854: mod_base = OTHER; note = thymine
  modified_base 1857..1858: mod_base = OTHER; note = thymine
  modified_base 1860: mod_base = OTHER; note = thymine
  modified_base 1864: mod_base = OTHER; note = thymine
  modified_base 1866..1869: mod_base = OTHER; note = thymine
  modified_base 1872: mod_base = OTHER; note = thymine
  modified_base 1875: mod_base = OTHER; note = thymine
  modified_base 1881: mod_base = OTHER; note = thymine
  modified_base 1884..1885: mod_base = OTHER; note = thymine
  modified_base 1887: mod_base = OTHER; note = thymine
  modified_base 1890: mod_base = OTHER; note = thymine
  modified_base 1894: mod_base = OTHER; note = thymine
  modified_base 1903..1905: mod_base = OTHER; note = thymine
  modified_base 1911: mod_base = OTHER; note = thymine
  modified_base 1914: mod_base = OTHER; note = thymine
  modified_base 1916..1917: mod_base = OTHER; note = thymine
  modified_base 1923..1924: mod_base = OTHER; note = thymine
  modified_base 1926: mod_base = OTHER; note = thymine
  modified_base 1929..1932: mod_base = OTHER; note = thymine
  modified_base 1935: mod_base = OTHER; note = thymine
  modified_base 1938..1939: mod_base = OTHER; note = thymine
  modified_base 1941: mod_base = OTHER; note = thymine
  modified_base 1953: mod_base = OTHER; note = thymine
  modified_base 1955..1956: mod_base = OTHER; note = thymine
  modified_base 1958..1959: mod_base = OTHER; note = thymine
  modified_base 1961..1962: mod_base = OTHER; note = thymine
  modified_base 1969..1971: mod_base = OTHER; note = thymine
  modified_base 1974: mod_base = OTHER; note = thymine
  modified_base 1980: mod_base = OTHER; note = thymine
  modified_base 1983..1986: mod_base = OTHER; note = thymine
  modified_base 1993: mod_base = OTHER; note = thymine
  modified_base 1995: mod_base = OTHER; note = thymine
  modified_base 1998: mod_base = OTHER; note = thymine
  modified_base 2000..2001: mod_base = OTHER; note = thymine
  modified_base 2004: mod_base = OTHER; note = thymine
  modified_base 2007: mod_base = OTHER; note = thymine
  modified_base 2010: mod_base = OTHER; note = thymine
  modified_base 2013..2014: mod_base = OTHER; note = thymine
  modified_base 2016: mod_base = OTHER; note = thymine
  modified_base 2018..2019: mod_base = OTHER; note = thymine
  modified_base 2022: mod_base = OTHER; note = thymine
  modified_base 2025..2028: mod_base = OTHER; note = thymine
  modified_base 2030..2032: mod_base = OTHER; note = thymine
  modified_base 2034: mod_base = OTHER; note = thymine
  modified_base 2038..2040: mod_base = OTHER; note = thymine
  modified_base 2042..2043: mod_base = OTHER; note = thymine
  modified_base 2046: mod_base = OTHER; note = thymine
  modified_base 2049: mod_base = OTHER; note = thymine
  modified_base 2052: mod_base = OTHER; note = thymine
  modified_base 2054..2055: mod_base = OTHER; note = thymine
  modified_base 2057..2058: mod_base = OTHER; note = thymine
  modified_base 2060..2061: mod_base = OTHER; note = thymine
  modified_base 2064: mod_base = OTHER; note = thymine
  modified_base 2067: mod_base = OTHER; note = thymine
  modified_base 2073: mod_base = OTHER; note = thymine
  modified_base 2079: mod_base = OTHER; note = thymine
  modified_base 2082: mod_base = OTHER; note = thymine
  modified_base 2084..2088: mod_base = OTHER; note = thymine
  modified_base 2091..2092: mod_base = OTHER; note = thymine
  modified_base 2094: mod_base = OTHER; note = thymine
  modified_base 2097: mod_base = OTHER; note = thymine
  modified_base 2100: mod_base = OTHER; note = thymine
  modified_base 2105..2106: mod_base = OTHER; note = thymine
  modified_base 2109: mod_base = OTHER; note = thymine
  modified_base 2112: mod_base = OTHER; note = thymine
  modified_base 2114..2115: mod_base = OTHER; note = thymine
  modified_base 2117..2118: mod_base = OTHER; note = thymine
  modified_base 2121: mod_base = OTHER; note = thymine
  modified_base 2124..2128: mod_base = OTHER; note = thymine
  modified_base 2133: mod_base = OTHER; note = thymine
  modified_base 2135..2136: mod_base = OTHER; note = thymine
  modified_base 2139: mod_base = OTHER; note = thymine
  modified_base 2144..2145: mod_base = OTHER; note = thymine
  modified_base 2148: mod_base = OTHER; note = thymine
  modified_base 2151: mod_base = OTHER; note = thymine
  modified_base 2157: mod_base = OTHER; note = thymine
  modified_base 2160: mod_base = OTHER; note = thymine
  modified_base 2163: mod_base = OTHER; note = thymine
  modified_base 2166: mod_base = OTHER; note = thymine
  modified_base 2169: mod_base = OTHER; note = thymine
  modified_base 2172: mod_base = OTHER; note = thymine
  modified_base 2174..2175: mod_base = OTHER; note = thymine
  modified_base 2178: mod_base = OTHER; note = thymine
  modified_base 2181: mod_base = OTHER; note = thymine
  modified_base 2183..2184: mod_base = OTHER; note = thymine
  modified_base 2186..2187: mod_base = OTHER; note = thymine
  modified_base 2189..2190: mod_base = OTHER; note = thymine
  modified_base 2193..2194: mod_base = OTHER; note = thymine
  modified_base 2196..2197: mod_base = OTHER; note = thymine
  modified_base 2199: mod_base = OTHER; note = thymine
  modified_base 2202: mod_base = OTHER; note = thymine
  modified_base 2204..2205: mod_base = OTHER; note = thymine
  modified_base 2208: mod_base = OTHER; note = thymine
  modified_base 2210: mod_base = OTHER; note = thymine
  modified_base 2222..2223: mod_base = OTHER; note = thymine
  modified_base 2226: mod_base = OTHER; note = thymine
  modified_base 2229..2232: mod_base = OTHER; note = thymine
  modified_base 2234..2235: mod_base = OTHER; note = thymine
  modified_base 2238..2239: mod_base = OTHER; note = thymine
  modified_base 2241: mod_base = OTHER; note = thymine
  modified_base 2249: mod_base = OTHER; note = thymine
  modified_base 2253: mod_base = OTHER; note = thymine
  modified_base 2256..2259: mod_base = OTHER; note = thymine
  modified_base 2262: mod_base = OTHER; note = thymine
  modified_base 2265: mod_base = OTHER; note = thymine
  modified_base 2271: mod_base = OTHER; note = thymine
  modified_base 2273..2274: mod_base = OTHER; note = thymine
  modified_base 2277: mod_base = OTHER; note = thymine
  modified_base 2286: mod_base = OTHER; note = thymine
  modified_base 2289: mod_base = OTHER; note = thymine
  modified_base 2294..2295: mod_base = OTHER; note = thymine
  modified_base 2297..2298: mod_base = OTHER; note = thymine
  modified_base 2301: mod_base = OTHER; note = thymine
  modified_base 2310: mod_base = OTHER; note = thymine
  modified_base 2313..2316: mod_base = OTHER; note = thymine
  modified_base 2319: mod_base = OTHER; note = thymine
  modified_base 2325..2326: mod_base = OTHER; note = thymine
  modified_base 2332..2337: mod_base = OTHER; note = thymine
  modified_base 2340: mod_base = OTHER; note = thymine
  modified_base 2348..2349: mod_base = OTHER; note = thymine
  modified_base 2351: mod_base = OTHER; note = thymine
  modified_base 2354..2355: mod_base = OTHER; note = thymine
  modified_base 2358: mod_base = OTHER; note = thymine
  modified_base 2360..2364: mod_base = OTHER; note = thymine
  modified_base 2367: mod_base = OTHER; note = thymine
  modified_base 2373: mod_base = OTHER; note = thymine
  modified_base 2376: mod_base = OTHER; note = thymine
  modified_base 2379: mod_base = OTHER; note = thymine
  modified_base 2385: mod_base = OTHER; note = thymine
  modified_base 2389..2391: mod_base = OTHER; note = thymine
  modified_base 2400: mod_base = OTHER; note = thymine
  modified_base 2403: mod_base = OTHER; note = thymine
  modified_base 2406: mod_base = OTHER; note = thymine
  modified_base 2409: mod_base = OTHER; note = thymine
  modified_base 2417..2418: mod_base = OTHER; note = thymine
  modified_base 2421: mod_base = OTHER; note = thymine
  modified_base 2424: mod_base = OTHER; note = thymine
  modified_base 2426..2427: mod_base = OTHER; note = thymine
  modified_base 2429..2430: mod_base = OTHER; note = thymine
  modified_base 2433: mod_base = OTHER; note = thymine
  modified_base 2441..2443: mod_base = OTHER; note = thymine
  modified_base 2445..2446: mod_base = OTHER; note = thymine
  modified_base 2448: mod_base = OTHER; note = thymine
  modified_base 2451: mod_base = OTHER; note = thymine
  modified_base 2454: mod_base = OTHER; note = thymine
  modified_base 2460: mod_base = OTHER; note = thymine
  modified_base 2462..2463: mod_base = OTHER; note = thymine
  modified_base 2466: mod_base = OTHER; note = thymine
  modified_base 2470: mod_base = OTHER; note = thymine
  modified_base 2472: mod_base = OTHER; note = thymine
  modified_base 2474..2475: mod_base = OTHER; note = thymine
  modified_base 2478: mod_base = OTHER; note = thymine
  modified_base 2481: mod_base = OTHER; note = thymine
  modified_base 2483..2487: mod_base = OTHER; note = thymine
  modified_base 2489..2491: mod_base = OTHER; note = thymine
  modified_base 2493: mod_base = OTHER; note = thymine
  modified_base 2496: mod_base = OTHER; note = thymine
  modified_base 2499: mod_base = OTHER; note = thymine
  modified_base 2502: mod_base = OTHER; note = thymine
  modified_base 2505: mod_base = OTHER; note = thymine
  modified_base 2508: mod_base = OTHER; note = thymine
  modified_base 2513: mod_base = OTHER; note = thymine
  modified_base 2515: mod_base = OTHER; note = thymine
  modified_base 2517: mod_base = OTHER; note = thymine
  modified_base 2520: mod_base = OTHER; note = thymine
  modified_base 2523: mod_base = OTHER; note = thymine
  modified_base 2526: mod_base = OTHER; note = thymine
  modified_base 2532: mod_base = OTHER; note = thymine
  modified_base 2535: mod_base = OTHER; note = thymine
  modified_base 2537..2538: mod_base = OTHER; note = thymine
  modified_base 2541..2542: mod_base = OTHER; note = thymine
  modified_base 2544: mod_base = OTHER; note = thymine
  modified_base 2547: mod_base = OTHER; note = thymine
  modified_base 2553..2556: mod_base = OTHER; note = thymine
  modified_base 2558..2559: mod_base = OTHER; note = thymine
  modified_base 2565: mod_base = OTHER; note = thymine
  modified_base 2568: mod_base = OTHER; note = thymine
  modified_base 2576..2578: mod_base = OTHER; note = thymine
  modified_base 2580: mod_base = OTHER; note = thymine
  modified_base 2582..2583: mod_base = OTHER; note = thymine
  modified_base 2589: mod_base = OTHER; note = thymine
  modified_base 2591..2593: mod_base = OTHER; note = thymine
  modified_base 2597..2598: mod_base = OTHER; note = thymine
  modified_base 2601: mod_base = OTHER; note = thymine
  modified_base 2606..2607: mod_base = OTHER; note = thymine
  modified_base 2612..2613: mod_base = OTHER; note = thymine
  modified_base 2616: mod_base = OTHER; note = thymine
  modified_base 2619: mod_base = OTHER; note = thymine
  modified_base 2621..2622: mod_base = OTHER; note = thymine
  modified_base 2628: mod_base = OTHER; note = thymine
  modified_base 2630: mod_base = OTHER; note = thymine
  modified_base 2633..2634: mod_base = OTHER; note = thymine
  modified_base 2637..2638: mod_base = OTHER; note = thymine
  modified_base 2640: mod_base = OTHER; note = thymine
  modified_base 2646: mod_base = OTHER; note = thymine
  modified_base 2649: mod_base = OTHER; note = thymine
  modified_base 2652: mod_base = OTHER; note = thymine
  modified_base 2657..2658: mod_base = OTHER; note = thymine
  modified_base 2663..2665: mod_base = OTHER; note = thymine
  modified_base 2667: mod_base = OTHER; note = thymine
  modified_base 2673: mod_base = OTHER; note = thymine
  modified_base 2675..2676: mod_base = OTHER; note = thymine
  modified_base 2682: mod_base = OTHER; note = thymine
  modified_base 2685: mod_base = OTHER; note = thymine
  modified_base 2687..2688: mod_base = OTHER; note = thymine
  modified_base 2694..2695: mod_base = OTHER; note = thymine
  modified_base 2697: mod_base = OTHER; note = thymine
  modified_base 2700: mod_base = OTHER; note = thymine
  modified_base 2703: mod_base = OTHER; note = thymine
  modified_base 2706: mod_base = OTHER; note = thymine
  modified_base 2709: mod_base = OTHER; note = thymine
  modified_base 2718..2721: mod_base = OTHER; note = thymine
  modified_base 2724: mod_base = OTHER; note = thymine
  modified_base 2727: mod_base = OTHER; note = thymine
  modified_base 2733: mod_base = OTHER; note = thymine
  modified_base 2736: mod_base = OTHER; note = thymine
  modified_base 2739..2743: mod_base = OTHER; note = thymine
  modified_base 2745: mod_base = OTHER; note = thymine
  modified_base 2754: mod_base = OTHER; note = thymine
  modified_base 2757: mod_base = OTHER; note = thymine
  modified_base 2762..2763: mod_base = OTHER; note = thymine
  modified_base 2765..2766: mod_base = OTHER; note = thymine
  modified_base 2772: mod_base = OTHER; note = thymine
  modified_base 2774..2775: mod_base = OTHER; note = thymine
  modified_base 2778: mod_base = OTHER; note = thymine
  modified_base 2780..2781: mod_base = OTHER; note = thymine
  modified_base 2790: mod_base = OTHER; note = thymine
  modified_base 2797: mod_base = OTHER; note = thymine
  modified_base 2799: mod_base = OTHER; note = thymine
  modified_base 2802: mod_base = OTHER; note = thymine
  modified_base 2804..2805: mod_base = OTHER; note = thymine
  modified_base 2807..2808: mod_base = OTHER; note = thymine
  modified_base 2810..2811: mod_base = OTHER; note = thymine
  modified_base 2814: mod_base = OTHER; note = thymine
  modified_base 2823: mod_base = OTHER; note = thymine
  modified_base 2826..2827: mod_base = OTHER; note = thymine
  modified_base 2829: mod_base = OTHER; note = thymine
  modified_base 2832: mod_base = OTHER; note = thymine
  modified_base 2834..2835: mod_base = OTHER; note = thymine
  modified_base 2838: mod_base = OTHER; note = thymine
  modified_base 2841: mod_base = OTHER; note = thymine
  modified_base 2844: mod_base = OTHER; note = thymine
  modified_base 2847: mod_base = OTHER; note = thymine
  modified_base 2850: mod_base = OTHER; note = thymine
  modified_base 2852: mod_base = OTHER; note = thymine
  modified_base 2855..2856: mod_base = OTHER; note = thymine
  modified_base 2859: mod_base = OTHER; note = thymine
  modified_base 2861..2862: mod_base = OTHER; note = thymine
  modified_base 2865: mod_base = OTHER; note = thymine
  modified_base 2867..2872: mod_base = OTHER; note = thymine
  modified_base 2874: mod_base = OTHER; note = thymine
  modified_base 2879..2880: mod_base = OTHER; note = thymine
  modified_base 2883: mod_base = OTHER; note = thymine
  modified_base 2892: mod_base = OTHER; note = thymine
  modified_base 2898: mod_base = OTHER; note = thymine
  modified_base 2902: mod_base = OTHER; note = thymine
  modified_base 2904..2907: mod_base = OTHER; note = thymine
  modified_base 2909..2910: mod_base = OTHER; note = thymine
  modified_base 2912..2913: mod_base = OTHER; note = thymine
  modified_base 2916: mod_base = OTHER; note = thymine
  modified_base 2918..2920: mod_base = OTHER; note = thymine
  modified_base 2922: mod_base = OTHER; note = thymine
  modified_base 2925..2926: mod_base = OTHER; note = thymine
  modified_base 2933..2934: mod_base = OTHER; note = thymine
  modified_base 2937: mod_base = OTHER; note = thymine
  modified_base 2943: mod_base = OTHER; note = thymine
  modified_base 2945..2946: mod_base = OTHER; note = thymine
  modified_base 2948..2949: mod_base = OTHER; note = thymine
  modified_base 2952: mod_base = OTHER; note = thymine
  modified_base 2955: mod_base = OTHER; note = thymine
  modified_base 2957..2958: mod_base = OTHER; note = thymine
  modified_base 2961..2962: mod_base = OTHER; note = thymine
  modified_base 2964: mod_base = OTHER; note = thymine
  modified_base 2970..2971: mod_base = OTHER; note = thymine
  modified_base 2973: mod_base = OTHER; note = thymine
  modified_base 2976: mod_base = OTHER; note = thymine
  modified_base 2978..2979: mod_base = OTHER; note = thymine
  modified_base 2982: mod_base = OTHER; note = thymine
  modified_base 2985..2986: mod_base = OTHER; note = thymine
  modified_base 2988..2989: mod_base = OTHER; note = thymine
  modified_base 2991: mod_base = OTHER; note = thymine
  modified_base 2994..2998: mod_base = OTHER; note = thymine
  modified_base 3000..3004: mod_base = OTHER; note = thymine
  modified_base 3006: mod_base = OTHER; note = thymine
  modified_base 3008..3009: mod_base = OTHER; note = thymine
  modified_base 3012: mod_base = OTHER; note = thymine
  modified_base 3016: mod_base = OTHER; note = thymine
  modified_base 3018: mod_base = OTHER; note = thymine
  modified_base 3021: mod_base = OTHER; note = thymine
  modified_base 3023..3024: mod_base = OTHER; note = thymine
  modified_base 3026..3027: mod_base = OTHER; note = thymine
  modified_base 3030..3033: mod_base = OTHER; note = thymine
  modified_base 3042: mod_base = OTHER; note = thymine
  modified_base 3049: mod_base = OTHER; note = thymine
  modified_base 3051: mod_base = OTHER; note = thymine
  modified_base 3056..3057: mod_base = OTHER; note = thymine
  modified_base 3061..3063: mod_base = OTHER; note = thymine
  modified_base 3066..3067: mod_base = OTHER; note = thymine
  modified_base 3069..3070: mod_base = OTHER; note = thymine
  modified_base 3072: mod_base = OTHER; note = thymine
  modified_base 3074..3075: mod_base = OTHER; note = thymine
  modified_base 3078..3079: mod_base = OTHER; note = thymine
  modified_base 3081: mod_base = OTHER; note = thymine
  modified_base 3084..3085: mod_base = OTHER; note = thymine
  modified_base 3087..3088: mod_base = OTHER; note = thymine
  modified_base 3090: mod_base = OTHER; note = thymine
  modified_base 3093: mod_base = OTHER; note = thymine
  modified_base 3096: mod_base = OTHER; note = thymine
  modified_base 3099..3103: mod_base = OTHER; note = thymine
  modified_base 3105: mod_base = OTHER; note = thymine
  modified_base 3107..3108: mod_base = OTHER; note = thymine
  modified_base 3111..3112: mod_base = OTHER; note = thymine
  modified_base 3117: mod_base = OTHER; note = thymine
  modified_base 3120: mod_base = OTHER; note = thymine
  modified_base 3126..3127: mod_base = OTHER; note = thymine
  modified_base 3129: mod_base = OTHER; note = thymine
  modified_base 3142..3144: mod_base = OTHER; note = thymine
  modified_base 3147: mod_base = OTHER; note = thymine
  modified_base 3149..3151: mod_base = OTHER; note = thymine
  modified_base 3153: mod_base = OTHER; note = thymine
  modified_base 3156: mod_base = OTHER; note = thymine
  modified_base 3162: mod_base = OTHER; note = thymine
  modified_base 3164..3165: mod_base = OTHER; note = thymine
  modified_base 3167..3168: mod_base = OTHER; note = thymine
  modified_base 3170..3171: mod_base = OTHER; note = thymine
  modified_base 3173..3174: mod_base = OTHER; note = thymine
  modified_base 3181: mod_base = OTHER; note = thymine
  modified_base 3183: mod_base = OTHER; note = thymine
  modified_base 3188..3189: mod_base = OTHER; note = thymine
  modified_base 3192: mod_base = OTHER; note = thymine
  modified_base 3197..3198: mod_base = OTHER; note = thymine
  modified_base 3201: mod_base = OTHER; note = thymine
  modified_base 3209..3210: mod_base = OTHER; note = thymine
  modified_base 3213: mod_base = OTHER; note = thymine
  modified_base 3216..3217: mod_base = OTHER; note = thymine
  modified_base 3219: mod_base = OTHER; note = thymine
  modified_base 3222: mod_base = OTHER; note = thymine
  modified_base 3224..3225: mod_base = OTHER; note = thymine
  modified_base 3234: mod_base = OTHER; note = thymine
  modified_base 3237: mod_base = OTHER; note = thymine
  modified_base 3240: mod_base = OTHER; note = thymine
  modified_base 3242..3243: mod_base = OTHER; note = thymine
  modified_base 3246: mod_base = OTHER; note = thymine
  misc_feature 1..3249: note = Synthetic
  source 1..3249: mol_type = other RNA
atggctgcttttaagcctaatcctattaattatattcttggtcttgctattggtattgcttctgttggttgggctatggttgagattgatgaggaggagaatcctattcgtcttattgatcttggtgttcgtgtttttgagcgtgctgaggttcctaagactggtgattctcttgctatggctcgtcgtcttgctcgttctgttcgtcgtcttactcgtcgtcgtgctcatcgtcttcttcgtgctcgtcgtcttcttaagcgtgagggtgttcttcaggctgctgattttgatgagaatggtcttattaagtctcttcctaatactccttggcagcttcgtgctgctgctcttgatcgtaagcttactcctcttgagtggtctgctgttcttcttcatcttattaagcatcgtggttatctttctcagcgtaagaatgagggtgagactgctgataaggagcttggtgctcttcttaagggtgttgctaataatgctcatgctcttcagactggtgattttcgtactcctgctgagcttgctcttaataagtttgagaaggagtctggtcatattcgtaatcagcgtggtgattattctcatactttttctcgtaaggatcttcaggctgagcttattcttctttttgagaagcagaaggagtttggtaatcctcatgtttctggtggtcttaaggagggtattgagactcttcttatgactcagcgtcctgctctttctggtgatgctgttcagaagatgcttggtcattgtacttttgagcctgctgagcctaaggctgctaagaatacttatactgctgagcgttttatttggcttactaagcttaataatcttcgtattcttgagcagggttctgagcgtcctcttactgatactgagcgtgctactcttatggatgagccttatcgtaagtctaagcttacttatgctcaggctcgtaagcttcttggtcttgaggatactgctttttttaagggtcttcgttatggtaaggataatgctgaggcttctactcttatggagatgaaggcttatcatgctatttctcgtgctcttgagaaggagggtcttaaggataagaagtctcctcttaatctttcttctgagcttcaggatgagattggtactgctttttctctttttaagactgatgaggatattactggtcgtcttaaggatcgtgttcagcctgagattcttgaggctcttcttaagcatatttcttttgataagtttgttcagatttctcttaaggctcttcgtcgtattgttcctcttatggagcagggtaagcgttatgatgaggcttgtgctgagatttatggtgatcattatggtaagaagaatactgaggagaagatttatcttcctcctattcctgctgatgagattcgtaatcctgttgttcttcgtgctctttctcaggctcgtaaggttattaatggtgttgttcgtcgttatggttctcctgctcgtattcatattgagactgctcgtgaggttggtaagtcttttaaggatcgtaaggagattgagaagcgtcaggaggagaatcgtaaggatcgtgagaaggctgctgctaagtttcgtgagtattttcctaattttgttggtgagcctaagtctaaggatattcttaagcttcgtctttatgagcagcagcatggtaagtgtctttattctggtaaggagattaatcttgttcgtcttaatgagaagggttatgttgagattgatcatgctcttcctttttctcgtacttgggatgattcttttaataataaggttcttgttcttggttctgagaatcagaataagggtaatcagactccttatgagtattttaatggtaaggataattctcgtgagtggcaggagtttaaggctcgtgttgagacttctcgttttcctcgttctaagaagcagcgtattcttcttcagaagtttgatgaggatggttttaaggagtgtaatcttaatgatactcgttatgttaatcgttttctttgtcagtttgttgctgatcatattcttcttactggtaagggtaagcgtcgtgtttttgcttctaatggtcagattactaatcttcttcgtggtttttggggtcttcgtaaggttcgtgctgagaatgatcgtcatcatgctcttgatgctgttgttgttgcttgttctactgttgctatgcagcagaagattactcgttttgttcgttataaggagatgaatgcttttgatggtaagactattgataaggagactggtaaggttcttcatcagaagactcattttcctcagccttgggagttttttgctcaggaggttatgattcgtgtttttggtaagcctgatggtaagcctgagtttgaggaggctgatactcctgagaagcttcgtactcttcttgctgagaagctttcttctcgtcctgaggctgttcatgagtatgttactcctctttttgtttctcgtgctcctaatcgtaagatgtctggtgctcataaggatactcttcgttctgctaagcgttttgttaagcataatgagaagatttctgttaagcgtgtttggcttactgagattaagcttgctgatcttgagaatatggttaattataagaatggtcgtgagattgagctttatgaggctcttaaggctcgtcttgaggcttatggtggtaatgctaagcaggcttttgatcctaaggataatcctttttataagaagggtggtcagcttgttaaggctgttcgtgttgagaagactcaggagtctggtgttcttcttaataagaagaatgcttatactattgctgataatggtgatatggttcgtgttgatgttttttgtaaggttgataagaagggtaagaatcagtattttattgttcctatttatgcttggcaggttgctgagaatattcttcctgatattgattgtaagggttatcgtattgatgattcttatactttttgtttttctcttcataagtatgatcttattgcttttcagaaggatgagaagtctaaggttgagtttgcttattatattaattgtgattcttctaatggtcgtttttatcttgcttggcatgataagggttctaaggagcagcagtttcgtatttctactcagaatcttgttcttattcagaagtatcaggttaatgagcttggtaaggagattcgtccttgtcgtcttaagaagcgtcctcctgttcgttga

SEQ ID NO: 392 - RNA, 3249 nt, synthetic construct
  modified_base 2: mod_base = OTHER; note = thymine
  modified_base 10..11: mod_base = OTHER; note = thymine
  modified_base 26: mod_base = OTHER; note = thymine
  modified_base 31: mod_base = OTHER; note = thymine
  modified_base 35: mod_base = OTHER; note = thymine
  modified_base 38: mod_base = OTHER; note = thymine
  modified_base 44: mod_base = OTHER; note = thymine
  modified_base 50: mod_base = OTHER; note = thymine
  modified_base 56: mod_base = OTHER; note = thymine
  modified_base 61: mod_base = OTHER; note = thymine
  modified_base 65: mod_base = OTHER; note = thymine
  modified_base 70: mod_base = OTHER; note = thymine
  modified_base 77: mod_base = OTHER; note = thymine
  modified_base 80: mod_base = OTHER; note = thymine
  modified_base 86: mod_base = OTHER; note = thymine
  modified_base 107: mod_base = OTHER; note = thymine
  modified_base 113: mod_base = OTHER; note = thymine
  modified_base 116: mod_base = OTHER; note = thymine
  modified_base 122: mod_base = OTHER; note = thymine
  modified_base 128: mod_base = OTHER; note = thymine
  modified_base 134: mod_base = OTHER; note = thymine
  modified_base 136..137: mod_base = OTHER; note = thymine
  modified_base 152: mod_base = OTHER; note = thymine
  modified_base 169: mod_base = OTHER; note = thymine
  modified_base 173: mod_base = OTHER; note = thymine
  modified_base 179: mod_base = OTHER; note = thymine
  modified_base 191: mod_base = OTHER; note = thymine
  modified_base 199: mod_base = OTHER; note = thymine
  modified_base 203: mod_base = OTHER; note = thymine
  modified_base 212: mod_base = OTHER; note = thymine
  modified_base 236: mod_base = OTHER; note = thymine
  modified_base 239: mod_base = OTHER; note = thymine
  modified_base 254: mod_base = OTHER; note = thymine
  modified_base 257: mod_base = OTHER; note = thymine
  modified_base 272: mod_base = OTHER; note = thymine
  modified_base 275: mod_base = OTHER; note = thymine
  modified_base 289..290: mod_base = OTHER; note = thymine
  modified_base 305: mod_base = OTHER; note = thymine
  modified_base 308: mod_base = OTHER; note = thymine
  modified_base 313: mod_base = OTHER; note = thymine
  modified_base 317: mod_base = OTHER; note = thymine
  modified_base 331: mod_base = OTHER; note = thymine
  modified_base 338: mod_base = OTHER; note = thymine
  modified_base 353: mod_base = OTHER; note = thymine
  modified_base 365: mod_base = OTHER; note = thymine
  modified_base 374: mod_base = OTHER; note = thymine
  modified_base 379: mod_base = OTHER; note = thymine
  modified_base 382: mod_base = OTHER; note = thymine
  modified_base 389: mod_base = OTHER; note = thymine
  modified_base 392: mod_base = OTHER; note = thymine
  modified_base 395: mod_base = OTHER; note = thymine
  modified_base 401: mod_base = OTHER; note = thymine
  modified_base 404: mod_base = OTHER; note = thymine
  modified_base 418: mod_base = OTHER; note = thymine
  modified_base 422: mod_base = OTHER; note = thymine
  modified_base 424: mod_base = OTHER; note = thymine
  modified_base 464: mod_base = OTHER; note = thymine
  modified_base 473: mod_base = OTHER; note = thymine
  modified_base 476: mod_base = OTHER; note = thymine
  modified_base 485: mod_base = OTHER; note = thymine
  modified_base 506: mod_base = OTHER; note = thymine
  modified_base 520..521: mod_base = OTHER; note = thymine
  modified_base 539: mod_base = OTHER; note = thymine
  modified_base 545: mod_base = OTHER; note = thymine
  modified_base 553..554: mod_base = OTHER; note = thymine
  modified_base 565: mod_base = OTHER; note = thymine
  modified_base 575: mod_base = OTHER; note = thymine
  modified_base 595: mod_base = OTHER; note = thymine
  modified_base 598: mod_base = OTHER; note = thymine
  modified_base 607..608: mod_base = OTHER; note = thymine
  modified_base 610: mod_base = OTHER; note = thymine
  modified_base 623: mod_base = OTHER; note = thymine
  modified_base 635: mod_base = OTHER; note = thymine
  modified_base 638: mod_base = OTHER; note = thymine
  modified_base 641: mod_base = OTHER; note = thymine
  modified_base 644: mod_base = OTHER; note = thymine
  modified_base 646..647: mod_base = OTHER; note = thymine
  modified_base 664..665: mod_base = OTHER; note = thymine
  modified_base 680: mod_base = OTHER; note = thymine
  modified_base 682: mod_base = OTHER; note = thymine
  modified_base 692: mod_base = OTHER; note = thymine
  modified_base 704: mod_base = OTHER; note = thymine
  modified_base 713: mod_base = OTHER; note = thymine
  modified_base 716: mod_base = OTHER; note = thymine
  modified_base 719: mod_base = OTHER; note = thymine
  modified_base 737: mod_base = OTHER; note = thymine
  modified_base 739: mod_base = OTHER; note = thymine
  modified_base 752: mod_base = OTHER; note = thymine
  modified_base 761: mod_base = OTHER; note = thymine
  modified_base 764: mod_base = OTHER; note = thymine
  modified_base 772: mod_base = OTHER; note = thymine
  modified_base 778..779: mod_base = OTHER; note = thymine
  modified_base 814: mod_base = OTHER; note = thymine
  modified_base 829..830: mod_base = OTHER; note = thymine
  modified_base 833: mod_base = OTHER; note = thymine
  modified_base 835: mod_base = OTHER; note = thymine
  modified_base 839: mod_base = OTHER; note = thymine
  modified_base 848: mod_base = OTHER; note = thymine
  modified_base 857: mod_base = OTHER; note = thymine
  modified_base 863: mod_base = OTHER; note = thymine
  modified_base 866: mod_base = OTHER; note = thymine
  modified_base 877: mod_base = OTHER; note = thymine
  modified_base 890: mod_base = OTHER; note = thymine
  modified_base 914: mod_base = OTHER; note = thymine
  modified_base 917: mod_base = OTHER; note = thymine
  modified_base 928: mod_base = OTHER; note = thymine
  modified_base 937: mod_base = OTHER; note = thymine
  modified_base 944: mod_base = OTHER; note = thymine
  modified_base 949: mod_base = OTHER; note = thymine
  modified_base 968: mod_base = OTHER; note = thymine
  modified_base 971: mod_base = OTHER; note = thymine
  modified_base 977: mod_base = OTHER; note = thymine
  modified_base 991..992: mod_base = OTHER; note = thymine
  modified_base 994..995: mod_base = OTHER; note = thymine
  modified_base 1004: mod_base = OTHER; note = thymine
  modified_base 1009: mod_base = OTHER; note = thymine
  modified_base 1033: mod_base = OTHER; note = thymine
  modified_base 1040: mod_base = OTHER; note = thymine
  modified_base 1043: mod_base = OTHER; note = thymine
  modified_base 1049: mod_base = OTHER; note = thymine
  modified_base 1057: mod_base = OTHER; note = thymine
  modified_base 1067: mod_base = OTHER; note = thymine
  modified_base 1069: mod_base = OTHER; note = thymine
  modified_base 1079: mod_base = OTHER; note = thymine
  modified_base 1094: mod_base = OTHER; note = thymine
  modified_base 1108: mod_base = OTHER; note = thymine
  modified_base 1115: mod_base = OTHER; note = thymine
  modified_base 1121: mod_base = OTHER; note = thymine
  modified_base 1123: mod_base = OTHER; note = thymine
  modified_base 1126: mod_base = OTHER; note = thymine
  modified_base 1133: mod_base = OTHER; note = thymine
  modified_base 1145: mod_base = OTHER; note = thymine
  modified_base 1156..1157: mod_base = OTHER; note = thymine
  modified_base 1159: mod_base = OTHER; note = thymine
  modified_base 1163: mod_base = OTHER; note = thymine
  modified_base 1165..1166: mod_base = OTHER; note = thymine
  modified_base 1184: mod_base = OTHER; note = thymine
  modified_base 1196: mod_base = OTHER; note = thymine
  modified_base 1208: mod_base = OTHER; note = thymine
  modified_base 1220: mod_base = OTHER; note = thymine
  modified_base 1223: mod_base = OTHER; note = thymine
  modified_base 1232: mod_base = OTHER; note = thymine
  modified_base 1235: mod_base = OTHER; note = thymine
  modified_base 1244: mod_base = OTHER; note = thymine
  modified_base 1246: mod_base = OTHER; note = thymine
  modified_base 1249..1250: mod_base = OTHER; note = thymine
  modified_base 1258..1259: mod_base = OTHER; note = thymine
  modified_base 1262: mod_base = OTHER; note = thymine
  modified_base 1268: mod_base = OTHER; note = thymine
  modified_base 1270: mod_base = OTHER; note = thymine
  modified_base 1274: mod_base = OTHER; note = thymine
  modified_base 1283: mod_base = OTHER; note = thymine
  modified_base 1292: mod_base = OTHER; note = thymine
  modified_base 1295: mod_base = OTHER; note = thymine
  modified_base 1301: mod_base = OTHER; note = thymine
  modified_base 1304: mod_base = OTHER; note = thymine
  modified_base 1321: mod_base = OTHER; note = thymine
  modified_base 1333: mod_base = OTHER; note = thymine
  modified_base 1343: mod_base = OTHER; note = thymine
  modified_base 1345: mod_base = OTHER; note = thymine
  modified_base 1357: mod_base = OTHER; note = thymine
  modified_base 1385: mod_base = OTHER; note = thymine
  modified_base 1387: mod_base = OTHER; note = thymine
  modified_base 1391: mod_base = OTHER; note = thymine
  modified_base 1400: mod_base = OTHER; note = thymine
  modified_base 1415: mod_base = OTHER; note = thymine
  modified_base 1427: mod_base = OTHER; note = thymine
  modified_base 1430: mod_base = OTHER; note = thymine
  modified_base 1433: mod_base = OTHER; note = thymine
  modified_base 1442: mod_base = OTHER; note = thymine
  modified_base 1444: mod_base = OTHER; note = thymine
  modified_base 1460: mod_base = OTHER; note = thymine
  modified_base 1463: mod_base = OTHER; note = thymine
  modified_base 1472: mod_base = OTHER; note = thymine
  modified_base 1475: mod_base = OTHER; note = thymine
  modified_base 1483: mod_base = OTHER; note = thymine
  modified_base 1489: mod_base = OTHER; note = thymine
  modified_base 1502: mod_base = OTHER; note = thymine
  modified_base 1508: mod_base = OTHER; note = thymine
  modified_base 1526: mod_base = OTHER; note = thymine
  modified_base 1534: mod_base = OTHER; note = thymine
  modified_base 1537..1538: mod_base = OTHER; note = thymine
  modified_base 1556: mod_base = OTHER; note = thymine
  modified_base 1609..1610: mod_base = OTHER; note = thymine
  modified_base 1618: mod_base = OTHER; note = thymine
  modified_base 1621..1622: mod_base = OTHER; note = thymine
  modified_base 1630..1631: mod_base = OTHER; note = thymine
  modified_base 1634: mod_base = OTHER; note = thymine
  modified_base 1648: mod_base = OTHER; note = thymine
  modified_base 1658: mod_base = OTHER; note = thymine
  modified_base 1661: mod_base = OTHER; note = thymine
  modified_base 1667: mod_base = OTHER; note = thymine
  modified_base 1673: mod_base = OTHER; note = thymine
  modified_base 1675: mod_base = OTHER; note = thymine
  modified_base 1696: mod_base = OTHER; note = thymine
  modified_base 1700: mod_base = OTHER; note = thymine
  modified_base 1702: mod_base = OTHER; note = thymine
  modified_base 1705: mod_base = OTHER; note = thymine
  modified_base 1718: mod_base = OTHER; note = thymine
  modified_base 1724: mod_base = OTHER; note = thymine
  modified_base 1727: mod_base = OTHER; note = thymine
  modified_base 1733: mod_base = OTHER; note = thymine
  modified_base 1747: mod_base = OTHER; note = thymine
  modified_base 1751: mod_base = OTHER; note = thymine
  modified_base 1757: mod_base = OTHER; note = thymine
  modified_base 1769: mod_base = OTHER; note = thymine
  modified_base 1774..1775: mod_base = OTHER; note = thymine
  modified_base 1777: mod_base = OTHER; note = thymine
  modified_base 1786: mod_base = OTHER; note = thymine
  modified_base 1795: mod_base = OTHER; note = thymine
  modified_base 1798..1799: mod_base = OTHER; note = thymine
  modified_base 1811: mod_base = OTHER; note = thymine
  modified_base 1814: mod_base = OTHER; note = thymine
  modified_base 1817: mod_base = OTHER; note = thymine
  modified_base 1820: mod_base = OTHER; note = thymine
  modified_base 1825: mod_base = OTHER; note = thymine
  modified_base 1858: mod_base = OTHER; note = thymine
  modified_base 1864: mod_base = OTHER; note = thymine
  modified_base 1867..1868: mod_base = OTHER; note = thymine
  modified_base 1885: mod_base = OTHER; note = thymine
  modified_base 1894: mod_base = OTHER; note = thymine
  modified_base 1903..1904: mod_base = OTHER; note = thymine
  modified_base 1916: mod_base = OTHER; note = thymine
  modified_base 1924: mod_base = OTHER; note = thymine
  modified_base 1930..1931: mod_base = OTHER; note = thymine
  modified_base 1939: mod_base = OTHER; note = thymine
  modified_base 1955: mod_base = OTHER; note = thymine
  modified_base 1958: mod_base = OTHER; note = thymine
  modified_base 1961: mod_base = OTHER; note = thymine
  modified_base 1969..1970: mod_base = OTHER; note = thymine
  modified_base 1984..1985: mod_base = OTHER; note = thymine
  modified_base 1993: mod_base = OTHER; note = thymine
  modified_base 2000: mod_base = OTHER; note = thymine
  modified_base 2014: mod_base = OTHER; note = thymine
  modified_base 2018: mod_base = OTHER; note = thymine
  modified_base 2026..2027: mod_base = OTHER; note = thymine
  modified_base 2030: mod_base = OTHER; note = thymine
  modified_base 2032: mod_base = OTHER; note = thymine
  modified_base 2038..2039: mod_base = OTHER; note = thymine
  modified_base 2042: mod_base = OTHER; note = thymine
  modified_base 2054: mod_base = OTHER; note = thymine
  modified_base 2057: mod_base = OTHER; note = thymine
  modified_base 2060: mod_base = OTHER; note = thymine
  modified_base 2084: mod_base = OTHER; note = thymine
  modified_base 2086..2087: mod_base = OTHER; note = thymine
  modified_base 2092: mod_base = OTHER; note = thymine
  modified_base 2105: mod_base = OTHER; note = thymine
  modified_base 2114: mod_base = OTHER; note = thymine
  modified_base 2117: mod_base = OTHER; note = thymine
  modified_base 2125..2126: mod_base = OTHER; note = thymine
  modified_base 2128: mod_base = OTHER; note = thymine
  modified_base 2135: mod_base = OTHER; note = thymine
  modified_base 2144: mod_base = OTHER; note = thymine
  modified_base 2174: mod_base = OTHER; note = thymine
  modified_base 2183: mod_base = OTHER; note = thymine
  modified_base 2186: mod_base = OTHER; note = thymine
  modified_base 2189: mod_base = OTHER; note = thymine
  modified_base 2194: mod_base = OTHER; note = thymine
  modified_base 2197: mod_base = OTHER; note = thymine
  modified_base 2204: mod_base = OTHER; note = thymine
  modified_base 2210: mod_base = OTHER; note = thymine
  modified_base 2222: mod_base = OTHER; note = thymine
  modified_base 2230..2231: mod_base = OTHER; note = thymine
  modified_base 2234: mod_base = OTHER; note = thymine
  modified_base 2239: mod_base = OTHER; note = thymine
  modified_base 2249: mod_base = OTHER; note = thymine
  modified_base 2257..2258: mod_base = OTHER; note = thymine
  modified_base 2273: mod_base = OTHER; note = thymine
  modified_base 2294: mod_base = OTHER; note = thymine
  modified_base 2297: mod_base = OTHER; note = thymine
  modified_base 2314..2315: mod_base = OTHER; note = thymine
  modified_base 2326: mod_base = OTHER; note = thymine
  modified_base 2332..2333: mod_base = OTHER; note = thymine
  modified_base 2335..2336: mod_base = OTHER; note = thymine
  modified_base 2348: mod_base = OTHER; note = thymine
  modified_base 2351: mod_base = OTHER; note = thymine
  modified_base 2354: mod_base = OTHER; note = thymine
  modified_base 2360: mod_base = OTHER; note = thymine
  modified_base 2362..2363: mod_base = OTHER; note = thymine
  modified_base 2389..2390: mod_base = OTHER; note = thymine
  modified_base 2417: mod_base = OTHER; note = thymine
  modified_base 2426: mod_base = OTHER; note = thymine
  modified_base 2429: mod_base = OTHER; note = thymine
  modified_base 2441: mod_base = OTHER; note = thymine
  modified_base 2443: mod_base = OTHER; note = thymine
  modified_base 2446: mod_base = OTHER; note = thymine
  modified_base 2462: mod_base = OTHER; note = thymine
  modified_base 2470: mod_base = OTHER; note = thymine
  modified_base 2474: mod_base = OTHER; note = thymine
  modified_base 2483: mod_base = OTHER; note = thymine
  modified_base 2485..2486: mod_base = OTHER; note = thymine
  modified_base 2489: mod_base = OTHER; note = thymine
  modified_base 2491: mod_base = OTHER; note = thymine
  modified_base 2513: mod_base = OTHER; note = thymine
  modified_base 2515: mod_base = OTHER; note = thymine
  modified_base 2537: mod_base = OTHER; note = thymine
  modified_base 2542: mod_base = OTHER; note = thymine
  modified_base 2554..2555: mod_base = OTHER; note = thymine
  modified_base 2558: mod_base = OTHER; note = thymine
  modified_base 2576: mod_base = OTHER; note = thymine
  modified_base 2578: mod_base = OTHER; note = thymine
  modified_base 2582: mod_base = OTHER; note = thymine
  modified_base 2591: mod_base = OTHER; note = thymine
  modified_base 2593: mod_base = OTHER; note = thymine
  modified_base 2597: mod_base = OTHER; note = thymine
  modified_base 2606: mod_base = OTHER; note = thymine
  modified_base 2612: mod_base = OTHER; note = thymine
  modified_base 2621: mod_base = OTHER; note = thymine
  modified_base 2630: mod_base = OTHER; note = thymine
  modified_base 2633: mod_base = OTHER; note = thymine
  modified_base 2638: mod_base = OTHER; note = thymine
  modified_base 2657: mod_base = OTHER; note = thymine
  modified_base 2663: mod_base = OTHER; note = thymine
  modified_base 2665: mod_base = OTHER; note = thymine
  modified_base 2675: mod_base = OTHER; note = thymine
  modified_base 2687: mod_base = OTHER; note = thymine
  modified_base 2695: mod_base = OTHER; note = thymine
  modified_base 2719..2720: mod_base = OTHER; note = thymine
  modified_base 2740..2741: mod_base = OTHER; note = thymine
  modified_base 2743: mod_base = OTHER; note = thymine
  modified_base 2762: mod_base = OTHER; note = thymine
  modified_base 2765: mod_base = OTHER; note = thymine
  modified_base 2774: mod_base = OTHER; note = thymine
  modified_base 2780: mod_base = OTHER; note = thymine
  modified_base 2797: mod_base = OTHER; note = thymine
  modified_base 2804: mod_base = OTHER; note = thymine
  modified_base 2807: mod_base = OTHER; note = thymine
  modified_base 2810: mod_base = OTHER; note = thymine
  modified_base 2827: mod_base = OTHER; note = thymine
  modified_base 2834: mod_base = OTHER; note = thymine
  modified_base 2852: mod_base = OTHER; note = thymine
  modified_base 2855: mod_base = OTHER; note = thymine
  modified_base 2861: mod_base = OTHER; note = thymine
  modified_base 2867: mod_base = OTHER; note = thymine
  modified_base 2869..2870: mod_base = OTHER; note = thymine
  modified_base 2872: mod_base = OTHER; note = thymine
  modified_base 2879: mod_base = OTHER; note = thymine
  modified_base 2902: mod_base = OTHER; note = thymine
  modified_base 2905..2906: mod_base = OTHER; note = thymine
  modified_base 2909: mod_base = OTHER; note = thymine
  modified_base 2912: mod_base = OTHER; note = thymine
  modified_base 2918: mod_base = OTHER; note = thymine
  modified_base 2920: mod_base = OTHER; note = thymine
  modified_base 2926: mod_base = OTHER; note = thymine
  modified_base 2933: mod_base = OTHER; note = thymine
  modified_base 2945: mod_base = OTHER; note = thymine
  modified_base 2948: mod_base = OTHER; note = thymine
  modified_base 2957: mod_base = OTHER; note = thymine
  modified_base 2962: mod_base = OTHER; note = thymine
  modified_base 2971: mod_base = OTHER; note = thymine
  modified_base 2978: mod_base = OTHER; note = thymine
  modified_base 2986: mod_base = OTHER; note = thymine
  modified_base 2989: mod_base = OTHER; note = thymine
  modified_base 2995..2996: mod_base = OTHER; note = thymine
  modified_base 2998: mod_base = OTHER; note = thymine
  modified_base 3001..3002: mod_base = OTHER; note = thymine
  modified_base 3004: mod_base = OTHER; note = thymine
  modified_base 3008: mod_base = OTHER; note = thymine
  modified_base 3016: mod_base = OTHER; note = thymine
  modified_base 3023: mod_base = OTHER; note = thymine
  modified_base 3026: mod_base = OTHER; note = thymine
  modified_base 3031..3032: mod_base = OTHER; note = thymine
  modified_base 3049: mod_base = OTHER; note = thymine
  modified_base 3056: mod_base = OTHER; note = thymine
  modified_base 3061..3062: mod_base = OTHER; note = thymine
  modified_base 3067: mod_base = OTHER; note = thymine
  modified_base 3070: mod_base = OTHER; note = thymine
  modified_base 3074: mod_base = OTHER; note = thymine
  modified_base 3079: mod_base = OTHER; note = thymine
  modified_base 3085: mod_base = OTHER; note = thymine
  modified_base 3088: mod_base = OTHER; note = thymine
  modified_base 3100..3101: mod_base = OTHER; note = thymine
  modified_base 3103: mod_base = OTHER; note = thymine
  modified_base 3107: mod_base = OTHER; note = thymine
  modified_base 3112: mod_base = OTHER; note = thymine
  modified_base 3127: mod_base = OTHER; note = thymine
  modified_base 3142..3143: mod_base = OTHER; note = thymine
  modified_base 3149: mod_base = OTHER; note = thymine
  modified_base 3151: mod_base = OTHER; note = thymine
  modified_base 3164: mod_base = OTHER; note = thymine
  modified_base 3167: mod_base = OTHER; note = thymine
  modified_base 3170: mod_base = OTHER; note = thymine
  modified_base 3173: mod_base = OTHER; note = thymine
  modified_base 3181: mod_base = OTHER; note = thymine
  modified_base 3188: mod_base = OTHER; note = thymine
  modified_base 3197: mod_base = OTHER; note = thymine
  modified_base 3209: mod_base = OTHER; note = thymine
  modified_base 3217: mod_base = OTHER; note = thymine
  modified_base 3224: mod_base = OTHER; note = thymine
  modified_base 3242: mod_base = OTHER; note = thymine
  misc_feature 1..3249: note = Synthetic
  source 1..3249: mol_type = other RNA
atggccgccttcaagcccaaccccatcaactacatcctgggcctggccatcggcatcgcctccgtgggctgggccatggtggagatcgacgaggaggagaaccccatccggctgatcgacctgggcgtgcgggtgttcgagcgggccgaggtgcccaagaccggcgactccctggccatggcccggcggctggcccggtccgtgcggcggctgacccggcggcgggcccaccggctgctgcgggcccggcggctgctgaagcgggagggcgtgctgcaggccgccgacttcgacgagaacggcctgatcaagtccctgcccaacaccccctggcagctgcgggccgccgccctggaccggaagctgacccccctggagtggtccgccgtgctgctgcacctgatcaagcaccggggctacctgtcccagcggaagaacgagggcgagaccgccgacaaggagctgggcgccctgctgaagggcgtggccaacaacgcccacgccctgcagaccggcgacttccggacccccgccgagctggccctgaacaagttcgagaaggagtccggccacatccggaaccagcggggcgactactcccacaccttctcccggaaggacctgcaggccgagctgatcctgctgttcgagaagcagaaggagttcggcaacccccacgtgtccggcggcctgaaggagggcatcgagaccctgctgatgacccagcggcccgccctgtccggcgacgccgtgcagaagatgctgggccactgcaccttcgagcccgccgagcccaaggccgccaagaacacctacaccgccgagcggttcatctggctgaccaagctgaacaacctgcggatcctggagcagggctccgagcggcccctgaccgacaccgagcgggccaccctgatggacgagccctaccggaagtccaagctgacctacgcccaggcccggaagctgctgggcctggaggacaccgccttcttcaagggcctgcggtacggcaaggacaacgccgaggcctccaccctgatggagatgaaggcctaccacgccatctcccgggccctggagaaggagggcctgaaggacaagaagtcccccctgaacctgtcctccgagctgcaggacgagatcggcaccgccttctccctgttcaagaccgacgaggacatcaccggccggctgaaggaccgggtgcagcccgagatcctggaggccctgctgaagcacatctccttcgacaagttcgtgcagatctccctgaaggccctgcggcggatcgtgcccctgatggagcagggcaagcggtacgacgaggcctgcgccgagatctacggcgaccactacggcaagaagaacaccgaggagaagatctacctgccccccatccccgccgacgagatccggaaccccgtggtgctgcgggccctgtcccaggcccggaaggtgatcaacggcgtggtgcggcggtacggctcccccgcccggatccacatcgagaccgcccgggaggtgggcaagtccttcaaggaccggaaggagatcgagaagcggcaggaggagaaccggaaggaccgggagaaggccgccgccaagttccgggagtacttccccaacttcgtgggcgagcccaagtccaaggacatcctgaagctgcggctgtacgagcagcagcacggcaagtgcctgtactccggcaaggagatcaacctggtgcggctgaacgagaagggctacgtggagatcgaccacgccctgcccttctcccggacctgggacgactccttcaacaacaaggtgctggtgctgggctccgagaaccagaacaagggcaaccagaccccctacgagtacttcaacggcaaggacaactcccgggagtggcaggagttcaaggcccgggtggagacctcccggttcccccggtccaagaagcagcggatcctgctgcagaagttcgacgaggacggcttcaaggagtgcaacctgaacgacacccggtacgtgaaccggttcctgtgccagttcgtggccgaccacatcctgctgaccggcaagggcaagcggcgggtgttcgcctccaacggccagatcaccaacctgctgcggggcttctggggcctgcggaaggtgcgggccgagaacgaccggcaccacgccctggacgccgtggtggtggcctgctccaccgtggccatgcagcagaagatcacccggttcgtgcggtacaaggagatgaacgccttcgacggcaagaccatcgacaaggagaccggcaaggtgctgcaccagaagacccacttcccccagccctgggagttcttcgcccaggaggtgatgatccgggtgttcggcaagcccgacggcaagcccgagttcgaggaggccgacacccccgagaagctgcggaccctgctggccgagaagctgtcctcccggcccgaggccgtgcacgagtacgtgacccccctgttcgtgtcccgggcccccaaccggaagatgtccggcgcccacaaggacaccctgcggtccgccaagcggttcgtgaagcacaacgagaagatctccgtgaagcgggtgtggctgaccgagatcaagctggccgacctggagaacatggtgaactacaagaacggccgggagatcgagctgtacgaggccctgaaggcccggctggaggcctacggcggcaacgccaagcaggccttcgaccccaaggacaaccccttctacaagaagggcggccagctggtgaaggccgtgcgggtggagaagacccaggagtccggcgtgctgctgaacaagaagaacgcctacaccatcgccgacaacggcgacatggtgcgggtggacgtgttctgcaaggtggacaagaagggcaagaaccagtacttcatcgtgcccatctacgcctggcaggtggccgagaacatcctgcccgacatcgactgcaagggctaccggatcgacgactcctacaccttctgcttctccctgcacaagtacgacctgatcgccttccagaaggacgagaagtccaaggtggagttcgcctactacatcaactgcgactcctccaacggccggttctacctggcctggcacgacaagggctccaaggagcagcagttccggatctccacccagaacctggtgctgatccagaagtaccaggtgaacgagctgggcaaggagatccggccctgccggctgaagaagcggccccccgtgcggtga

SEQ ID NO: 393 - RNA, 3249 nt, synthetic construct
  modified_base 2: mod_base = OTHER; note = thymine
  modified_base 10..11: mod_base = OTHER; note = thymine
  modified_base 26: mod_base = OTHER; note = thymine
  modified_base 31: mod_base = OTHER; note = thymine
  modified_base 35: mod_base = OTHER; note = thymine
  modified_base 38: mod_base = OTHER; note = thymine
  modified_base 44: mod_base = OTHER; note = thymine
  modified_base 50: mod_base = OTHER; note = thymine
  modified_base 56: mod_base = OTHER; note = thymine
  modified_base 61: mod_base = OTHER; note = thymine
  modified_base 65: mod_base = OTHER; note = thymine
  modified_base 70: mod_base = OTHER; note = thymine
  modified_base 77: mod_base = OTHER; note = thymine
  modified_base 80: mod_base = OTHER; note = thymine
  modified_base 86: mod_base = OTHER; note = thymine
  modified_base 107: mod_base = OTHER; note = thymine
  modified_base 113: mod_base = OTHER; note = thymine
  modified_base 116: mod_base = OTHER; note = thymine
  modified_base 122: mod_base = OTHER; note = thymine
  modified_base 128: mod_base = OTHER; note = thymine
  modified_base 134: mod_base = OTHER; note = thymine
  modified_base 136..137: mod_base = OTHER; note = thymine
  modified_base 152: mod_base = OTHER; note = thymine
  modified_base 169: mod_base = OTHER; note = thymine
  modified_base 173: mod_base = OTHER; note = thymine
  modified_base 179: mod_base = OTHER; note = thymine
  modified_base 191: mod_base = OTHER; note = thymine
  modified_base 199: mod_base = OTHER; note = thymine
  modified_base 203: mod_base = OTHER; note = thymine
  modified_base 212: mod_base = OTHER; note = thymine
  modified_base 236: mod_base = OTHER; note = thymine
  modified_base 239: mod_base = OTHER; note = thymine
  modified_base 254: mod_base = OTHER; note = thymine
  modified_base 257: mod_base = OTHER; note = thymine
  modified_base 272: mod_base = OTHER; note = thymine
  modified_base 275: mod_base = OTHER; note = thymine
  modified_base 289..290: mod_base = OTHER; note = thymine
  modified_base 305: mod_base = OTHER; note = thymine
  modified_base 308: mod_base = OTHER; note = thymine
  modified_base 313: mod_base = OTHER; note = thymine
  modified_base 317: mod_base = OTHER; note = thymine
  modified_base 331: mod_base = OTHER; note = thymine
  modified_base 338: mod_base = OTHER; note = thymine
  modified_base 353: mod_base = OTHER; note = thymine
  modified_base 365: mod_base = OTHER; note = thymine
  modified_base 374: mod_base = OTHER; note = thymine
  modified_base 379: mod_base = OTHER; note = thymine
  modified_base 382: mod_base = OTHER; note = thymine
  modified_base 389: mod_base = OTHER; note = thymine
  modified_base 392: mod_base = OTHER; note = thymine
  modified_base 395: mod_base = OTHER; note = thymine
  modified_base 401: mod_base = OTHER; note = thymine
  modified_base 404: mod_base = OTHER; note = thymine
  modified_base 418: mod_base = OTHER; note = thymine
  modified_base 422: mod_base = OTHER; note = thymine
  modified_base 424: mod_base = OTHER; note = thymine
  modified_base 464: mod_base = OTHER; note = thymine
  modified_base 473: mod_base = OTHER; note = thymine
  modified_base 476: mod_base = OTHER; note = thymine
  modified_base 485: mod_base = OTHER; note = thymine
  modified_base 506: mod_base = OTHER; note = thymine
  modified_base 520..521: mod_base = OTHER; note = thymine
  modified_base 539: mod_base = OTHER; note = thymine
  modified_base 545: mod_base = OTHER; note = thymine
  modified_base 553..554: mod_base = OTHER; note = thymine
  modified_base 565: mod_base = OTHER; note = thymine
  modified_base 575: mod_base = OTHER; note = thymine
  modified_base 595: mod_base = OTHER; note = thymine
  modified_base 598: mod_base = OTHER; note = thymine
  modified_base 607..608: mod_base = OTHER; note = thymine
  modified_base 610: mod_base = OTHER; note = thymine
  modified_base 623: mod_base = OTHER; note = thymine
  modified_base 635: mod_base = OTHER; note = thymine
  modified_base 638: mod_base = OTHER; note = thymine
  modified_base 641: mod_base = OTHER; note = thymine
  modified_base 644: mod_base = OTHER; note = thymine
  modified_base 646..647: mod_base = OTHER; note = thymine
  modified_base 664..665: mod_base = OTHER; note = thymine
  modified_base 680: mod_base = OTHER; note = thymine
  modified_base 682: mod_base = OTHER; note = thymine
  modified_base 692: mod_base = OTHER; note = thymine
  modified_base 704: mod_base = OTHER; note = thymine
  modified_base 713: mod_base = OTHER; note = thymine
  modified_base 716: mod_base = OTHER; note = thymine
  modified_base 719: mod_base = OTHER; note = thymine
  modified_base 737: mod_base = OTHER; note = thymine
  modified_base 739: mod_base = OTHER; note = thymine
  modified_base 752: mod_base = OTHER; note = thymine
  modified_base 761: mod_base = OTHER; note = thymine
  modified_base 764: mod_base = OTHER; note = thymine
  modified_base 772: mod_base = OTHER; note = thymine
  modified_base 778..779: mod_base = OTHER; note = thymine
  modified_base 814: mod_base = OTHER; note = thymine
  modified_base 829..830: mod_base = OTHER; note = thymine
  modified_base 833: mod_base = OTHER; note = thymine
  modified_base 835: mod_base = OTHER; note = thymine
  modified_base 839: mod_base = OTHER; note = thymine
  modified_base 848: mod_base = OTHER; note = thymine
  modified_base 857: mod_base = OTHER; note = thymine
  modified_base 863: mod_base = OTHER; note = thymine
  modified_base 866: mod_base = OTHER; note = thymine
  modified_base 877: mod_base = OTHER; note = thymine
  modified_base 890: mod_base = OTHER; note = thymine
  modified_base 914: mod_base = OTHER; note = thymine
  modified_base 917: mod_base = OTHER; note = thymine
  modified_base 928: mod_base = OTHER; note = thymine
  modified_base 937: mod_base = OTHER; note = thymine
  modified_base 944: mod_base = OTHER; note = thymine
  modified_base 949: mod_base = OTHER; note = thymine
  modified_base 968: mod_base = OTHER; note = thymine
  modified_base 971: mod_base = OTHER; note = thymine
  modified_base 977: mod_base = OTHER; note = thymine
  modified_base 991..992: mod_base = OTHER; note = thymine
  modified_base 994..995: mod_base = OTHER; note = thymine
  modified_base 1004: mod_base = OTHER; note = thymine
  modified_base 1009: mod_base = OTHER; note = thymine
  modified_base 1033: mod_base = OTHER; note = thymine
  modified_base 1040: mod_base = OTHER; note = thymine
  modified_base 1043: mod_base = OTHER; note = thymine
  modified_base 1049: mod_base = OTHER; note = thymine
  modified_base 1057: mod_base = OTHER; note = thymine
  modified_base 1067: mod_base = OTHER; note = thymine
  modified_base 1069: mod_base = OTHER; note = thymine
  modified_base 1079: mod_base = OTHER; note = thymine
  modified_base 1094: mod_base = OTHER; note = thymine
  modified_base 1108: mod_base = OTHER; note = thymine
  modified_base 1115: mod_base = OTHER; note = thymine
  modified_base 1121: mod_base = OTHER; note = thymine
  modified_base 1123: mod_base = OTHER; note = thymine
  modified_base 1126: mod_base = OTHER; note = thymine
  modified_base 1133: mod_base = OTHER; note = thymine
  modified_base 1145: mod_base = OTHER; note = thymine
  modified_base 1156..1157: mod_base = OTHER; note = thymine
  modified_base 1159: mod_base = OTHER; note = thymine
  modified_base 1163: mod_base = OTHER; note = thymine
  modified_base 1165..1166: mod_base = OTHER; note = thymine
  modified_base 1184: mod_base = OTHER; note = thymine
  modified_base 1196: mod_base = OTHER; note = thymine
  modified_base 1208: mod_base = OTHER; note = thymine
  modified_base 1220: mod_base = OTHER; note = thymine
  modified_base 1223: mod_base = OTHER; note = thymine
  modified_base 1232: mod_base = OTHER; note = thymine
  modified_base 1235: mod_base = OTHER; note = thymine
  modified_base 1244: mod_base = OTHER; note = thymine
  modified_base 1246: mod_base = OTHER; note = thymine
  modified_base 1249..1250: mod_base = OTHER; note = thymine
  modified_base 1258..1259: mod_base = OTHER; note = thymine
  modified_base 1262: mod_base = OTHER; note = thymine
  modified_base 1268: mod_base = OTHER; note = thymine
  modified_base 1270: mod_base = OTHER; note = thymine
  modified_base 1274: mod_base = OTHER; note = thymine
  modified_base 1283: mod_base = OTHER; note = thymine
  modified_base 1292: mod_base = OTHER; note = thymine
  modified_base 1295: mod_base = OTHER; note = thymine
  modified_base 1301: mod_base = OTHER; note = thymine
  modified_base 1304: mod_base = OTHER; note = thymine
  modified_base 1321: mod_base = OTHER; note = thymine
  modified_base 1333: mod_base = OTHER; note = thymine
  modified_base 1343: mod_base = OTHER; note = thymine
  modified_base 1345: mod_base = OTHER; note = thymine
  modified_base 1357: mod_base = OTHER; note = thymine
  modified_base 1385: mod_base = OTHER; note = thymine
  modified_base 1387: mod_base = OTHER; note = thymine
  modified_base 1391: mod_base = OTHER; note = thymine
  modified_base 1400: mod_base = OTHER; note = thymine
  modified_base 1415: mod_base = OTHER; note = thymine
  modified_base 1427: mod_base = OTHER; note = thymine
  modified_base 1430: mod_base = OTHER; note = thymine
  modified_base 1433: mod_base = OTHER; note = thymine
  modified_base 1442: mod_base = OTHER; note = thymine
  modified_base 1444: mod_base = OTHER; note = thymine
  modified_base 1460: mod_base = OTHER; note = thymine
  modified_base 1463: mod_base = OTHER; note = thymine
  modified_base 1472: mod_base = OTHER; note = thymine
  modified_base 1475: mod_base = OTHER; note = thymine
  modified_base 1483: mod_base = OTHER; note = thymine
  modified_base 1489: mod_base = OTHER; note = thymine
  modified_base 1502: mod_base = OTHER; note = thymine
  modified_base 1508: mod_base = OTHER; note = thymine
  modified_base 1526: mod_base = OTHER; note = thymine
  modified_base 1534: mod_base = OTHER; note = thymine
  modified_base 1537..1538: mod_base = OTHER; note = thymine
  modified_base 1556: mod_base = OTHER; note = thymine
  modified_base 1609..1610: mod_base = OTHER; note = thymine
  modified_base 1618: mod_base = OTHER; note = thymine
  modified_base 1621..1622: mod_base = OTHER; note = thymine
  modified_base 1630..1631: mod_base = OTHER; note = thymine
  modified_base 1634: mod_base = OTHER; note = thymine
  modified_base 1648: mod_base = OTHER; note = thymine
  modified_base 1658: mod_base = OTHER; note = thymine
  modified_base 1661: mod_base = OTHER; note = thymine
  modified_base 1667: mod_base = OTHER; note = thymine
  modified_base 1673: mod_base = OTHER; note = thymine
  modified_base 1675: mod_base = OTHER; note = thymine
  modified_base 1696: mod_base = OTHER; note = thymine
  modified_base 1700: mod_base = OTHER; note = thymine
  modified_base 1702: mod_base = OTHER; note = thymine
  modified_base 1705: mod_base = OTHER; note = thymine
  modified_base 1718: mod_base = OTHER; note = thymine
  modified_base 1724: mod_base = OTHER; note = thymine
  modified_base 1727: mod_base = OTHER; note = thymine
  modified_base 1733: mod_base = OTHER; note = thymine
  modified_base 1747: mod_base = OTHER; note = thymine
  modified_base 1751: mod_base = OTHER; note = thymine
  modified_base 1757: mod_base = OTHER; note = thymine
  modified_base 1769: mod_base = OTHER; note = thymine
  modified_base 1774..1775: mod_base = OTHER; note = thymine
  modified_base 1777: mod_base = OTHER; note = thymine
  modified_base 1786: mod_base = OTHER; note = thymine
  modified_base 1795: mod_base = OTHER; note = thymine
  modified_base 1798..1799: mod_base = OTHER; note = thymine
  modified_base 1811: mod_base = OTHER; note = thymine
  modified_base 1814: mod_base = OTHER; note = thymine
  modified_base 1817: mod_base = OTHER; note = thymine
  modified_base 1820: mod_base = OTHER; note = thymine
  modified_base 1825: mod_base = OTHER; note = thymine
  modified_base 1858: mod_base = OTHER; note = thymine
  modified_base 1864: mod_base = OTHER; note = thymine
  modified_base 1867..1868: mod_base = OTHER; note = thymine
  modified_base 1885: mod_base = OTHER; note = thymine
  modified_base 1894: mod_base = OTHER; note = thymine
  modified_base 1903..1904: mod_base = OTHER; note = thymine
  modified_base 1916: mod_base = OTHER; note = thymine
  modified_base 1924: mod_base = OTHER; note = thymine
  modified_base 1930..1931: mod_base = OTHER; note = thymine
  modified_base 1939: mod_base = OTHER; note = thymine
  modified_base 1955: mod_base = OTHER; note = thymine
  modified_base 1958: mod_base = OTHER; note = thymine
  modified_base 1961: mod_base = OTHER; note = thymine
  modified_base 1969..1970: mod_base = OTHER; note = thymine
  modified_base 1984..1985: mod_base = OTHER; note = thymine
  modified_base 1993: mod_base = OTHER; note = thymine
  modified_base 2000: mod_base = OTHER; note = thymine
  modified_base 2014: mod_base = OTHER; note = thymine
  modified_base 2018: mod_base = OTHER; note = thymine
  modified_base 2026..2027: mod_base = OTHER; note = thymine
  modified_base 2030: mod_base = OTHER; note = thymine
  modified_base 2032: mod_base = OTHER; note = thymine
  modified_base 2038..2039: mod_base = OTHER; note = thymine
  modified_base 2042: mod_base = OTHER; note = thymine
  modified_base 2054: mod_base = OTHER; note = thymine
  modified_base 2057: mod_base = OTHER; note = thymine
  modified_base 2060: mod_base = OTHER; note = thymine
  modified_base 2084: mod_base = OTHER; note = thymine
  modified_base 2086..2087: mod_base = OTHER; note = thymine
  modified_base 2092: mod_base = OTHER; note = thymine
  modified_base 2105: mod_base = OTHER; note = thymine
  modified_base 2114: mod_base = OTHER; note = thymine
  modified_base 2117: mod_base = OTHER; note = thymine
  modified_base 2125..2126: mod_base = OTHER; note = thymine
  modified_base 2128: mod_base = OTHER; note = thymine
  modified_base 2135: mod_base = OTHER; note = thymine
  modified_base 2144: mod_base = OTHER; note = thymine
  modified_base 2174: mod_base = OTHER; note = thymine
  modified_base 2183: mod_base = OTHER; note = thymine
  modified_base 2186: mod_base = OTHER; note = thymine
  modified_base 2189: mod_base = OTHER; note = thymine
  modified_base 2194: mod_base = OTHER; note = thymine
  modified_base 2197: mod_base = OTHER; note = thymine
  modified_base 2204: mod_base = OTHER; note = thymine
  modified_base 2210: mod_base = OTHER; note = thymine
  modified_base 2222: mod_base = OTHER; note = thymine
  modified_base 2230..2231: mod_base = OTHER; note = thymine
  modified_base 2234: mod_base = OTHER; note = thymine
  modified_base 2239: mod_base = OTHER; note = thymine
  modified_base 2249: mod_base = OTHER; note = thymine
  modified_base 2257..2258: mod_base = OTHER; note = thymine
  modified_base 2273: mod_base = OTHER; note = thymine
  modified_base 2294: mod_base = OTHER; note = thymine
  modified_base 2297: mod_base = OTHER; note = thymine
  modified_base 2314..2315: mod_base = OTHER; note = thymine
  modified_base 2326: mod_base = OTHER; note = thymine
  modified_base 2332..2333: mod_base = OTHER; note = thymine
  modified_base 2335..2336: mod_base = OTHER; note = thymine
  modified_base 2348: mod_base = OTHER; note = thymine
  modified_base 2351: mod_base = OTHER; note = thymine
  modified_base 2354: mod_base = OTHER; note = thymine
  modified_base 2360: mod_base = OTHER; note = thymine
  modified_base 2362..2363: mod_base = OTHER; note = thymine
  modified_base 2389..2390: mod_base = OTHER; note = thymine
  modified_base 2417: mod_base = OTHER; note = thymine
  modified_base 2426: mod_base = OTHER; note = thymine
  modified_base 2429: mod_base = OTHER; note = thymine
  modified_base 2441: mod_base = OTHER; note = thymine
  modified_base 2443: mod_base = OTHER; note = thymine
  modified_base 2446: mod_base = OTHER; note = thymine
  modified_base 2462: mod_base = OTHER; note = thymine
  modified_base 2470: mod_base = OTHER; note = thymine
  modified_base 2474: mod_base = OTHER; note = thymine
  modified_base 2483: mod_base = OTHER; note = thymine
  modified_base 2485..2486: mod_base = OTHER; note = thymine
  modified_base 2489: mod_base = OTHER; note = thymine
  modified_base 2491: mod_base = OTHER; note = thymine
  modified_base 2513: mod_base = OTHER; note = thymine
  modified_base 2515: mod_base = OTHER; note = thymine
  modified_base 2537: mod_base = OTHER; note = thymine
  modified_base 2542: mod_base = OTHER; note = thymine
  modified_base 2554..2555: mod_base = OTHER; note = thymine
  modified_base 2558: mod_base = OTHER; note = thymine
  modified_base 2576: mod_base = OTHER; note = thymine
  modified_base 2578: mod_base = OTHER; note = thymine
  modified_base 2582: mod_base = OTHER; note = thymine
  modified_base 2591: mod_base = OTHER; note = thymine
  modified_base 2593: mod_base = OTHER; note = thymine
  modified_base 2597: mod_base = OTHER; note = thymine
  modified_base 2606: mod_base = OTHER; note = thymine
  modified_base 2612: mod_base = OTHER; note = thymine
  modified_base 2621: mod_base = OTHER; note = thymine
  modified_base 2630: mod_base = OTHER; note = thymine
  modified_base 2633: mod_base = OTHER; note = thymine
  modified_base 2638: mod_base = OTHER; note = thymine
  modified_base 2657: mod_base = OTHER; note = thymine
  modified_base 2663: mod_base = OTHER; note = thymine
  modified_base 2665: mod_base = OTHER; note = thymine
  modified_base 2675: mod_base = OTHER; note = thymine
  modified_base 2687: mod_base = OTHER; note = thymine
  modified_base 2695: mod_base = OTHER; note = thymine
  modified_base 2719..2720: mod_base = OTHER; note = thymine
  modified_base 2740..2741: mod_base = OTHER; note = thymine
  modified_base 2743: mod_base = OTHER; note = thymine
  modified_base 2762: mod_base = OTHER; note = thymine
  modified_base 2765: mod_base = OTHER; note = thymine
  modified_base 2774: mod_base = OTHER; note = thymine
  modified_base 2780: mod_base = OTHER; note = thymine
  modified_base 2797: mod_base = OTHER; note = thymine
  modified_base 2804: mod_base = OTHER; note = thymine
  modified_base 2807: mod_base = OTHER; note = thymine
  modified_base 2810: mod_base = OTHER; note = thymine
  modified_base 2827: mod_base = OTHER; note = thymine
  modified_base 2834: mod_base = OTHER; note = thymine
  modified_base 2852: mod_base = OTHER; note = thymine
  modified_base 2855: mod_base = OTHER; note = thymine
  modified_base 2861: mod_base = OTHER; note = thymine
  modified_base 2867: mod_base = OTHER; note = thymine
  modified_base 2869..2870: mod_base = OTHER; note = thymine
  modified_base 2872: mod_base = OTHER; note = thymine
  modified_base 2879: mod_base = OTHER; note = thymine
  modified_base 2902: mod_base = OTHER; note = thymine
  modified_base 2905..2906: mod_base = OTHER; note = thymine
  modified_base 2909: mod_base = OTHER; note = thymine
  modified_base 2912: mod_base = OTHER; note = thymine
  modified_base 2918: mod_base = OTHER; note = thymine
  modified_base 2920: mod_base = OTHER; note = thymine
  modified_base 2926: mod_base = OTHER; note = thymine
  modified_base 2933: mod_base = OTHER; note = thymine
  modified_base 2945: mod_base = OTHER; note = thymine
  modified_base 2948: mod_base = OTHER; note = thymine
  modified_base 2957: mod_base = OTHER; note = thymine
  modified_base 2962: mod_base = OTHER; note = thymine
  modified_base 2971: mod_base = OTHER; note = thymine
  modified_base 2978: mod_base = OTHER; note = thymine
  modified_base 2986: mod_base = OTHER; note = thymine
  modified_base 2989: mod_base = OTHER; note = thymine
  modified_base 2995..2996: mod_base = OTHER; note = thymine
  modified_base 2998: mod_base = OTHER; note = thymine
  modified_base 3001..3002: mod_base = OTHER; note = thymine
  modified_base 3004: mod_base = OTHER; note = thymine
  modified_base 3008: mod_base = OTHER; note = thymine
  modified_base 3016: mod_base = OTHER; note = thymine
  modified_base 3023: mod_base = OTHER; note = thymine
  modified_base 3026: mod_base = OTHER; note = thymine
  modified_base 3031..3032: mod_base = OTHER; note = thymine
  modified_base 3049: mod_base = OTHER; note = thymine
  modified_base 3056: mod_base = OTHER; note = thymine
  modified_base 3061..3062: mod_base = OTHER; note = thymine
  modified_base 3067: mod_base = OTHER; note = thymine
  modified_base 3070: mod_base = OTHER; note = thymine
  modified_base 3074: mod_base = OTHER; note = thymine
  modified_base 3079: mod_base = OTHER; note = thymine
  modified_base 3085: mod_base = OTHER; note = thymine
  modified_base 3088: mod_base = OTHER; note = thymine
  modified_base 3100..3101: mod_base = OTHER; note = thymine
  modified_base 3103: mod_base = OTHER; note = thymine
  modified_base 3107: mod_base = OTHER; note = thymine
  modified_base 3112: mod_base = OTHER; note = thymine
  modified_base 3127: mod_base = OTHER; note = thymine
  modified_base 3142..3143: mod_base = OTHER; note = thymine
  modified_base 3149: mod_base = OTHER; note = thymine
  modified_base 3151: mod_base = OTHER; note = thymine
  modified_base 3164: mod_base = OTHER; note = thymine
  modified_base 3167: mod_base = OTHER; note = thymine
  modified_base 3170: mod_base = OTHER; note = thymine
  modified_base 3173: mod_base = OTHER; note = thymine
  modified_base 3181: mod_base = OTHER; note = thymine
  modified_base 3188: mod_base = OTHER; note = thymine
  modified_base 3197: mod_base = OTHER; note = thymine
  modified_base 3209: mod_base = OTHER; note = thymine
  modified_base 3217: mod_base = OTHER; note = thymine
  modified_base 3224: mod_base = OTHER; note = thymine
  modified_base 3242: mod_base = OTHER; note = thymine
  misc_feature 1..3249: note = Synthetic
  source 1..3249: mol_type = other RNA
atggccgccttcaagcccaaccccatcaactacatcctgggcctggccatcggcatcgcctccgtgggctgggccatggtggagatcgacgaggaggagaaccccatccggctgatcgacctgggcgtgcgggtgttcgagcgggccgaggtgcccaagaccggcgactccctggccatggcccggcggctggcccggtccgtgcggcggctgacccggcggcgggcccaccggctgctgcgggcccggcggctgctgaagcgggagggcgtgctgcaggccgccgacttcgacgagaacggcctgatcaagtccctgcccaacaccccctggcagctgcgggccgccgccctggaccggaagctgacccccctggagtggtccgccgtgctgctgcacctgatcaagcaccggggctacctgtcccagcggaagaacgagggcgagaccgccgacaaggagctgggcgccctgctgaagggcgtggccaacaacgcccacgccctgcagaccggcgacttccggacccccgccgagctggccctgaacaagttcgagaaggagtccggccacatccggaaccagcggggcgactactcccacaccttctcccggaaggacctgcaggccgagctgatcctgctgttcgagaagcagaaggagttcggcaacccccacgtgtccggcggcctgaaggagggcatcgagaccctgctgatgacccagcggcccgccctgtccggcgacgccgtgcagaagatgctgggccactgcaccttcgagcccgccgagcccaaggccgccaagaacacctacaccgccgagcggttcatctggctgaccaagctgaacaacctgcggatcctggagcagggctccgagcggcccctgaccgacaccgagcgggccaccctgatggacgagccctaccggaagtccaagctgacctacgcccaggcccggaagctgctgggcctggaggacaccgccttcttcaagggcctgcggtacggcaaggacaacgccgaggcctccaccctgatggagatgaaggcctaccacgccatctcccgggccctggagaaggagggcctgaaggacaagaagtcccccctgaacctgtcctccgagctgcaggacgagatcggcaccgccttctccctgttcaagaccgacgaggacatcaccggccggctgaaggaccgggtgcagcccgagatcctggaggccctgctgaagcacatctccttcgacaagttcgtgcagatctccctgaaggccctgcggcggatcgtgcccctgatggagcagggcaagcggtacgacgaggcctgcgccgagatctacggcgaccactacggcaagaagaacaccgaggagaagatctacctgccccccatccccgccgacgagatccggaaccccgtggtgctgcgggccctgtcccaggcccggaaggtgatcaacggcgtggtgcggcggtacggctcccccgcccggatccacatcgagaccgcccgggaggtgggcaagtccttcaaggaccggaaggagatcgagaagcggcaggaggagaaccggaaggaccgggagaaggccgccgccaagttccgggagtacttccccaacttcgtgggcgagcccaagtccaaggacatcctgaagctgcggctgtacgagcagcagcacggcaagtgcctgtactccggcaaggagatcaacctggtgcggctgaacgagaagggctacgtggagatcgaccacgccctgcccttctcccggacctgggacgactccttcaacaacaaggtgctggtgctgggctccgagaaccagaacaagggcaaccagaccccctacgagtacttcaacggcaaggacaactcccgggagtggcaggagttcaaggcccgggtggagacctcccggttcccccggtccaagaagcagcggatcctgctgcagaagttcgacgaggacggcttcaaggagtgcaacctgaacgacacccggtacgtgaaccggttcctgtgccagttcgtggccgaccacatcctgctgaccggcaagggcaagcggcgggtgttcgcctccaacggccagatcaccaacctgctgcggggcttctggggcctgcggaaggtgcgggccgagaacgaccggcaccacgccctggacgccgtggtggtggcctgctccaccgtggccatgcagcagaagatcacccggttcgtgcggtacaaggagatgaacgccttcgacggcaagaccatcgacaaggagaccggcaaggtgctgcaccagaagacccacttcccccagccctgggagttcttcgcccaggaggtgatgatccgggtgttcggcaagcccgacggcaagcccgagttcgaggaggccgacacccccgagaagctgcggaccctgctggccgagaagctgtcctcccggcccgaggccgtgcacgagtacgtgacccccctgttcgtgtcccgggcccccaaccggaagatgtccggcgcccacaaggacaccctgcggtccgccaagcggttcgtgaagcacaacgagaagatctccgtgaagcgggtgtggctgaccgagatcaagctggccgacctggagaacatggtgaactacaagaacggccgggagatcgagctgtacgaggccctgaaggcccggctggaggcctacggcggcaacgccaagcaggccttcgaccccaaggacaaccccttctacaagaagggcggccagctggtgaaggccgtgcgggtggagaagacccaggagtccggcgtgctgctgaacaagaagaacgcctacaccatcgccgacaacggcgacatggtgcgggtggacgtgttctgcaaggtggacaagaagggcaagaaccagtacttcatcgtgcccatctacgcctggcaggtggccgagaacatcctgcccgacatcgactgcaagggctaccggatcgacgactcctacaccttctgcttctccctgcacaagtacgacctgatcgccttccagaaggacgagaagtccaaggtggagttcgcctactacatcaactgcgactcctccaacggccggttctacctggcctggcacgacaagggctccaaggagcagcagttccggatctccacccagaacctggtgctgatccagaagtaccaggtgaacgagctgggcaaggagatccggccctgccggctgaagaagcggccccccgtgcggtaa

SEQ ID NO: 394-400 - skipped (7 entries)

SEQ ID NO: 401 - RNA, 100 nt, synthetic construct
  misc_feature 1..100: note = Synthetic
  modified_base 1..100: mod_base = OTHER; note = 2'-O-Me and PS modification may or may not be present
  source 1..100: mol_type = other RNA
cgcacgggtaccaggggccagttttagagctagaaatagcaagttaaaataaggctagtccgttatcaacttgaaaaagtggcaccgagtcggtgctttt

SEQ ID NO: 402 - RNA, 100 nt, synthetic construct
  misc_feature 1..100: note = Synthetic
  modified_base 1..100: mod_base = OTHER; note = 2'-O-Me and PS modification may or may not be present
  source 1..100: mol_type = other RNA
gcacgggtaccaggggccacgttttagagctagaaatagcaagttaaaataaggctagtccgttatcaacttgaaaaagtggcaccgagtcggtgctttt

SEQ ID NO: 403 - RNA, 100 nt, synthetic construct
  misc_feature 1..100: note = Synthetic
  modified_base 1..100: mod_base = OTHER; note = 2'-O-Me and PS modification may or may not be present
  source 1..100: mol_type = other RNA
cacgggtaccaggggccacggttttagagctagaaatagcaagttaaaataaggctagtccgttatcaacttgaaaaagtggcaccgagtcggtgctttt

SEQ ID NO: 404 - RNA, 100 nt, synthetic construct
  misc_feature 1..100: note = Synthetic
  modified_base 1..100: mod_base = OTHER; note = 2'-O-Me and PS modification may or may not be present
  source 1..100: mol_type = other RNA
gggaggcgccccgtggccccgttttagagctagaaatagcaagttaaaataaggctagtccgttatcaacttgaaaaagtggcaccgagtcggtgctttt

SEQ ID NO: 405 - RNA, 100 nt, synthetic construct
  misc_feature 1..100: note = Synthetic
  modified_base 1..100: mod_base = OTHER; note = 2'-O-Me and PS modification may or may not be present
  source 1..100: mol_type = other RNA
gcgatcagggaggcgccccggttttagagctagaaatagcaagttaaaataaggctagtccgttatcaacttgaaaaagtggcaccgagtcggtgctttt

SEQ ID NO: 406 - RNA, 100 nt, synthetic construct
  misc_feature 1..100: note = Synthetic
  modified_base 1..100: mod_base = OTHER; note = 2'-O-Me and PS modification may or may not be present
  source 1..100: mol_type = other RNA
cgggctggcctcccacaagggttttagagctagaaatagcaagttaaaataaggctagtccgttatcaacttgaaaaagtggcaccgagtcggtgctttt

SEQ ID NO: 407 - RNA, 100 nt, synthetic construct
  misc_feature 1..100: note = Synthetic
  modified_base 1..100: mod_base = OTHER; note = 2'-O-Me and PS modification may or may not be present
  source 1..100: mol_type = other RNA
ctccttgtgggaggccagccgttttagagctagaaatagcaagttaaaataaggctagtccgttatcaacttgaaaaagtggcaccgagtcggtgctttt

SEQ ID NO: 408 - RNA, 100 nt, synthetic construct
  misc_feature 1..100: note = Synthetic
  modified_base 1..100: mod_base = OTHER; note = 2'-O-Me and PS modification may or may not be present
  source 1..100: mol_type = other RNA
ggctggcctcccacaaggaggttttagagctagaaatagcaagttaaaataaggctagtccgttatcaacttgaaaaagtggcaccgagtcggtgctttt

SEQ ID NO: 409 - RNA, 100 nt, synthetic construct
  misc_feature 1..100: note = Synthetic
  modified_base 1..100: mod_base = OTHER; note = 2'-O-Me and PS modification may or may not be present
  source 1..100: mol_type = other RNA
ttgtctcccctccttgtggggttttagagctagaaatagcaagttaaaataaggctagtccgttatcaacttgaaaaagtggcaccgagtcggtgctttt

SEQ ID NO: 410 - RNA, 100 nt, synthetic construct
  misc_feature 1..100: note = Synthetic
  modified_base 1..100: mod_base = OTHER; note = 2'-O-Me and PS modification may or may not be present
  source 1..100: mol_type = other RNA
ccacaaggaggggagacaatgttttagagctagaaatagcaagttaaaataaggctagtccgttatcaacttgaaaaagtggcaccgagtcggtgctttt

SEQ ID NO: 411 - RNA, 100 nt, synthetic construct
  misc_feature 1..100: note = Synthetic
  modified_base 1..100: mod_base = OTHER; note = 2'-O-Me and PS modification may or may not be present
  source 1..100: mol_type = other RNA
cacaaggaggggagacaattgttttagagctagaaatagcaagttaaaataaggctagtccgttatcaacttgaaaaagtggcaccgagtcggtgctttt

SEQ ID NO: 412 - RNA, 100 nt, synthetic construct
  misc_feature 1..100: note = Synthetic
  modified_base 1..100: mod_base = OTHER; note = 2'-O-Me and PS modification may or may not be present
  source 1..100: mol_type = other RNA
caattgtctcccctccttgtgttttagagctagaaatagcaagttaaaataaggctagtccgttatcaacttgaaaaagtggcaccgagtcggtgctttt

SEQ ID NO: 413 - RNA, 100 nt, synthetic construct
  misc_feature 1..100: note = Synthetic
  modified_base 1..100: mod_base = OTHER; note = 2'-O-Me and PS modification may or may not be present
  source 1..100: mol_type = other RNA
ccaattgtctcccctccttggttttagagctagaaatagcaagttaaaataaggctagtccgttatcaacttgaaaaagtggcaccgagtcggtgctttt

SEQ ID NO: 414 - RNA, 100 nt, synthetic construct
  misc_feature 1..100: note = Synthetic
  modified_base 1..100: mod_base = OTHER; note = 2'-O-Me and PS modification may or may not be present
  source 1..100: mol_type = other RNA
atccctcgaatactgatgaggttttagagctagaaatagcaagttaaaataaggctagtccgttatcaacttgaaaaagtggcaccgagtcggtgctttt

SEQ ID NO: 415 - RNA, 100 nt, synthetic construct
  misc_feature 1..100: note = Synthetic
  modified_base 1..100: mod_base = OTHER; note = 2'-O-Me and PS modification may or may not be present
  source 1..100: mol_type = other RNA
aaccactcatcagtattcgagttttagagctagaaatagcaagttaaaataaggctagtccgttatcaacttgaaaaagtggcaccgagtcggtgctttt

SEQ ID NO: 416 - RNA, 100 nt, synthetic construct
  misc_feature 1..100: note = Synthetic
  modified_base 1..100: mod_base = OTHER; note = 2'-O-Me and PS modification may or may not be present
  source 1..100: mol_type = other RNA
gaaccactcatcagtattcggttttagagctagaaatagcaagttaaaataaggctagtccgttatcaacttgaaaaagtggcaccgagtcggtgctttt

SEQ ID NO: 417 - skipped

SEQ ID NO: 418 - RNA, 100 nt, synthetic construct
  misc_feature 1..100: note = Synthetic
  modified_base 1..100: mod_base = OTHER; note = 2'-O-Me and PS modification may or may not be present
  source 1..100: mol_type = other RNA
ggcccgtgacttttcctctcgttttagagctagaaatagcaagttaaaataaggctagtccgttatcaacttgaaaaagtggcaccgagtcggtgctttt

SEQ ID NO: 419 - RNA, 100 nt, synthetic construct
  misc_feature 1..100: note = Synthetic
  modified_base 1..100: mod_base = OTHER; note = 2'-O-Me and PS modification may or may not be present
  source 1..100: mol_type = other RNA
tgcttcacactcaatgtgtggttttagagctagaaatagcaagttaaaataaggctagtccgttatcaacttgaaaaagtggcaccgagtcggtgctttt

SEQ ID NO: 420 - RNA, 100 nt, synthetic construct
  misc_feature 1..100: note = Synthetic
  modified_base 1..100: mod_base = OTHER; note = 2'-O-Me and PS modification may or may not be present
  source 1..100: mol_type = other RNA
gcttcacactcaatgtgtgtgttttagagctagaaatagcaagttaaaataaggctagtccgttatcaacttgaaaaagtggcaccgagtcggtgctttt

SEQ ID NO: 421 - RNA, 100 nt, synthetic construct
  misc_feature 1..100: note = Synthetic
  modified_base 1..100: mod_base = OTHER; note = 2'-O-Me and PS modification may or may not be present
  source 1..100: mol_type = other RNA
cttcacactcaatgtgtgtggttttagagctagaaatagcaagttaaaataaggctagtccgttatcaacttgaaaaagtggcaccgagtcggtgctttt

SEQ ID NO: 422 - RNA, 100 nt, synthetic construct
  misc_feature 1..100: note = Synthetic
  modified_base 1..100: mod_base = OTHER; note = 2'-O-Me and PS modification may or may not be present
  source 1..100: mol_type = other RNA
ttcacactcaatgtgtgtgggttttagagctagaaatagcaagttaaaataaggctagtccgttatcaacttgaaaaagtggcaccgagtcggtgctttt

SEQ ID NO: 423 - skipped

SEQ ID NO: 424 - RNA, 100 nt, synthetic construct
  misc_feature 1..100: note = Synthetic
  modified_base 1..100: mod_base = OTHER; note = 2'-O-Me and PS modification may or may not be present
  source 1..100: mol_type = other RNA
aggggccctgaccctgctaagttttagagctagaaatagcaagttaaaataaggctagtccgttatcaacttgaaaaagtggcaccgagtcggtgctttt

SEQ ID NO: 425-426 - skipped (2 entries)

SEQ ID NO: 427 - RNA, 100 nt, synthetic construct
  misc_feature 1..100: note = Synthetic
  modified_base 1..100: mod_base = OTHER; note = 2'-O-Me and PS modification may or may not be present
  source 1..100: mol_type = other RNA
tgagatttcttgtctcactggttttagagctagaaatagcaagttaaaataaggctagtccgttatcaacttgaaaaagtggcaccgagtcggtgctttt

SEQ ID NO: 428 - RNA, 100 nt, synthetic construct
  misc_feature 1..100: note = Synthetic
  modified_base 1..100: mod_base = OTHER; note = 2'-O-Me and PS modification may or may not be present
  source 1..100: mol_type = other RNA
gagatttcttgtctcactgagttttagagctagaaatagcaagttaaaataaggctagtccgttatcaacttgaaaaagtggcaccgagtcggtgctttt

SEQ ID NO: 429 - RNA, 100 nt, synthetic construct
  misc_feature 1..100: note = Synthetic
  modified_base 1..100: mod_base = OTHER; note = 2'-O-Me and PS modification may or may not be present
  source 1..100: mol_type = other RNA
taaagcacctgttaaaatgagttttagagctagaaatagcaagttaaaataaggctagtccgttatcaacttgaaaaagtggcaccgagtcggtgctttt

SEQ ID NO: 430 - RNA, 100 nt, synthetic construct
  misc_feature 1..100: note = Synthetic
  modified_base 1..100: mod_base = OTHER; note = 2'-O-Me and PS modification may or may not be present
  source 1..100: mol_type = other RNA
aatctgtccttcattttaacgttttagagctagaaatagcaagttaaaataaggctagtccgttatcaacttgaaaaagtggcaccgagtcggtgctttt

SEQ ID NO: 431 - RNA, 100 nt, synthetic construct
  misc_feature 1..100: note = Synthetic
  modified_base 1..100: mod_base = OTHER; note = 2'-O-Me and PS modification may or may not be present
  source 1..100: mol_type = other RNA
gtcacaggggaaggtccctggttttagagctagaaatagcaagttaaaataaggctagtccgttatcaacttgaaaaagtggcaccgagtcggtgctttt

SEQ ID NO: 432 - RNA, 100 nt, synthetic construct
  misc_feature 1..100: note = Synthetic
  modified_base 1..100: mod_base = OTHER; note = 2'-O-Me and PS modification may or may not be present
  source 1..100: mol_type = other RNA
aacatgaagaaagcaggtgtgttttagagctagaaatagcaagttaaaataaggctagtccgttatcaacttgaaaaagtggcaccgagtcggtgctttt

SEQ ID NO: 433 - RNA, 100 nt, synthetic construct
  misc_feature 1..100: note = Synthetic
  modified_base 1..100: mod_base = OTHER; note = 2'-O-Me and PS modification may or may not be present
  source 1..100: mol_type = other RNA
aaacatgaagaaagcaggtggttttagagctagaaatagcaagttaaaataaggctagtccgttatcaacttgaaaaagtggcaccgagtcggtgctttt

SEQ ID NO: 434 - RNA, 100 nt, synthetic construct
  misc_feature 1..100: note = Synthetic
  modified_base 1..100: mod_base = OTHER; note = 2'-O-Me and PS modification may or may not be present
  source 1..100: mol_type = other RNA
tcaggaaacatgaagaaagcgttttagagctagaaatagcaagttaaaataaggctagtccgttatcaacttgaaaaagtggcaccgagtcggtgctttt

SEQ ID NO: 435 - RNA, 100 nt, synthetic construct
  misc_feature 1..100: note = Synthetic
  modified_base 1..100: mod_base = OTHER; note = 2'-O-Me and PS modification may or may not be present
  source 1..100: mol_type = other RNA
tgtcctgtgagataccagaagttttagagctagaaatagcaagttaaaataaggctagtccgttatcaacttgaaaaagtggcaccgagtcggtgctttt

SEQ ID NO: 436 - skipped

SEQ ID NO: 437 - RNA, 100 nt, synthetic construct
  misc_feature 1..100: note = Synthetic
  modified_base 1..100: mod_base = OTHER; note = 2'-O-Me and PS modification may or may not be present
  source 1..100: mol_type = other RNA
aggctgatgcctgaggtcctgttttagagctagaaatagcaagttaaaataaggctagtccgttatcaacttgaaaaagtggcaccgagtcggtgctttt

SEQ ID NO: 438 - RNA, 100 nt, synthetic construct
  misc_feature 1..100: note = Synthetic
  modified_base 1..100: mod_base = OTHER; note = 2'-O-Me and PS modification may or may not be present
  source 1..100: mol_type = other RNA
ggctgatgcctgaggtccttgttttagagctagaaatagcaagttaaaataaggctagtccgttatcaacttgaaaaagtggcaccgagtcggtgctttt

SEQ ID NO: 439 - RNA, 100 nt, synthetic construct
  misc_feature 1..100: note = Synthetic
  modified_base 1..100: mod_base = OTHER; note = 2'-O-Me and PS modification may or may not be present
  source 1..100: mol_type = other RNA
cacaatatcccaaggacctcgttttagagctagaaatagcaagttaaaataaggctagtccgttatcaacttgaaaaagtggcaccgagtcggtgctttt

SEQ ID NO: 440 - RNA, 100 nt, synthetic construct
  misc_feature 1..100: note = Synthetic
  modified_base 1..100: mod_base = OTHER; note = 2'-O-Me and PS modification may or may not be present
  source 1..100: mol_type = other RNA
ggtccttgggatattgtgttgttttagagctagaaatagcaagttaaaataaggctagtccgttatcaacttgaaaaagtggcaccgagtcggtgctttt

SEQ ID NO: 441 - RNA, 100 nt, synthetic construct
  misc_feature 1..100: note = Synthetic
  modified_base 1..100: mod_base = OTHER; note = 2'-O-Me and PS modification may or may not be present
  source 1..100: mol_type = other RNA
gtccttgggatattgtgtttgttttagagctagaaatagcaagttaaaataaggctagtccgttatcaacttgaaaaagtggcaccgagtcggtgctttt

SEQ ID NO: 442 - RNA, 100 nt, synthetic construct
  misc_feature 1..100: note = Synthetic
  modified_base 1..100: mod_base = OTHER; note = 2'-O-Me and PS modification may or may not be present
  source 1..100: mol_type = other RNA
ctcccaaacacaatatcccagttttagagctagaaatagcaagttaaaataaggctagtccgttatcaacttgaaaaagtggcaccgagtcggtgctttt

SEQ ID NO: 443 - RNA, 100 nt, synthetic construct
  misc_feature 1..100: note = Synthetic
  modified_base 1..100: mod_base = OTHER; note = 2'-O-Me and PS modification may or may not be present
  source 1..100: mol_type = other RNA
tcctctagccacatcttctggttttagagctagaaatagcaagttaaaataaggctagtccgttatcaacttgaaaaagtggcaccgagtcggtgctttt

SEQ ID NO: 444 - skipped

SEQ ID NO: 445 - RNA, 100 nt, synthetic construct
  misc_feature 1..100: note = Synthetic
  modified_base 1..100: mod_base = OTHER; note = 2'-O-Me and PS modification may or may not be present
  modified_base 1..100: mod_base = OTHER; note = 2'-O-Me and PS modification may or may not be present
  source 1..100: mol_type = other RNA
cctctagccacatcttctgtgttttagagctagaaatagcaagttaaaataaggctagtccgttatcaacttgaaaaagtggcaccgagtcggtgctttt

SEQ ID NO: 446 - RNA, 100 nt, synthetic construct
  misc_feature 1..100: note = Synthetic
  modified_base 1..100: mod_base = OTHER; note = 2'-O-Me and PS modification may or may not be present
  modified_base 1..100: mod_base = OTHER; note = 2'-O-Me and PS modification may or may not be present
  source 1..100: mol_type = other RNA
cccacagaagatgtggctaggttttagagctagaaatagcaagttaaaataaggctagtccgttatcaacttgaaaaagtggcaccgagtcggtgctttt

SEQ ID NO: 447 - RNA, 100 nt, synthetic construct
  misc_feature 1..100: note = Synthetic
  modified_base 1..100: mod_base = OTHER; note = 2'-O-Me and PS modification may or may not be present
  modified_base 1..100: mod_base = OTHER; note = 2'-O-Me and PS modification may or may not be present
  source 1..100: mol_type = other RNA
gtcagatcccacagaagatggttttagagctagaaatagcaagttaaaataaggctagtccgttatcaacttgaaaaagtggcaccgagtcggtgctttt

SEQ ID NO: 448 - RNA, 100 nt, synthetic construct
  misc_feature 1..100: note = Synthetic
  modified_base 1..100: mod_base = OTHER; note = 2'-O-Me and PS modification may or may not be present
  modified_base 1..100: mod_base = OTHER; note = 2'-O-Me and PS modification may or may not be present
  source 1..100: mol_type = other RNA
atcttctgtgggatctgaccgttttagagctagaaatagcaagttaaaataaggctagtccgttatcaacttgaaaaagtggcaccgagtcggtgctttt

SEQ ID NO: 449 - RNA, 100 nt, synthetic construct
  misc_feature 1..100: note = Synthetic
  modified_base 1..100: mod_base = OTHER; note = 2'-O-Me and PS modification may or may not be present
  modified_base 1..100: mod_base = OTHER; note = 2'-O-Me and PS modification may or may not be present
  source 1..100: mol_type = other RNA
cccaggcagtgacagtgcccgttttagagctagaaatagcaagttaaaataaggctagtccgttatcaacttgaaaaagtggcaccgagtcggtgctttt

SEQ ID NO: 450 - RNA, 100 nt, synthetic construct
  misc_feature 1..100: note = Synthetic
  modified_base 1..100: mod_base = OTHER; note = 2'-O-Me and PS modification may or may not be present
  modified_base 1..100: mod_base = OTHER; note = 2'-O-Me and PS modification may or may not be present
  source 1..100: mol_type = other RNA
ctgggcactgtcactgcctggttttagagctagaaatagcaagttaaaataaggctagtccgttatcaacttgaaaaagtggcaccgagtcggtgctttt

SEQ ID NO: 451 - RNA, 100 nt, synthetic construct
  misc_feature 1..100: note = Synthetic
  modified_base 1..100: mod_base = OTHER; note = 2'-O-Me and PS modification may or may not be present
  modified_base 1..100: mod_base = OTHER; note = 2'-O-Me and PS modification may or may not be present
  source 1..100: mol_type = other RNA
cctgggcactgtcactgcctgttttagagctagaaatagcaagttaaaataaggctagtccgttatcaacttgaaaaagtggcaccgagtcggtgctttt

SEQ ID NO: 452 - RNA, 100 nt, synthetic construct
  misc_feature 1..100: note = Synthetic
  modified_base 1..100: mod_base = OTHER; note = 2'-O-Me and PS modification may or may not be present
  modified_base 1..100: mod_base = OTHER; note = 2'-O-Me and PS modification may or may not be present
  source 1..100: mol_type = other RNA
tggagggcctgatgtgtgttgttttagagctagaaatagcaagttaaaataaggctagtccgttatcaacttgaaaaagtggcaccgagtcggtgctttt

SEQ ID NO: 453 - RNA, 100 nt, synthetic construct
  misc_feature 1..100: note = Synthetic
  modified_base 1..100: mod_base = OTHER; note = 2'-O-Me and PS modification may or may not be present
  source 1..100: mol_type = other RNA
gcctgatgtgtgttgggtgtgttttagagctagaaatagcaagttaaaataaggctagtccgttatcaacttgaaaaagtggcaccgagtcggtgctttt

SEQ ID NO: 454 - skipped

SEQ ID NO: 455 - RNA, 100 nt, synthetic construct
  misc_feature 1..100: note = Synthetic
  modified_base 1..100: mod_base = OTHER; note = 2'-O-Me and PS modification may or may not be present
  source 1..100: mol_type = other RNA
cccaacacccaacacacatcgttttagagctagaaatagcaagttaaaataaggctagtccgttatcaacttgaaaaagtggcaccgagtcggtgctttt

SEQ ID NO: 456 - RNA, 100 nt, synthetic construct
  misc_feature 1..100: note = Synthetic
  modified_base 1..100: mod_base = OTHER; note = 2'-O-Me and PS modification may or may not be present
  source 1..100: mol_type = other RNA
ttgggtgttgggcggaacaggttttagagctagaaatagcaagttaaaataaggctagtccgttatcaacttgaaaaagtggcaccgagtcggtgctttt

SEQ ID NO: 457 - RNA, 100 nt, synthetic construct
  misc_feature 1..100: note = Synthetic
  modified_base 1..100: mod_base = OTHER; note = 2'-O-Me and PS modification may or may not be present
  source 1..100: mol_type = other RNA
tggatgtattgagcatgcgagttttagagctagaaatagcaagttaaaataaggctagtccgttatcaacttgaaaaagtggcaccgagtcggtgctttt

SEQ ID NO: 458 - RNA, 100 nt, synthetic construct
  misc_feature 1..100: note = Synthetic
  modified_base 1..100: mod_base = OTHER; note = 2'-O-Me and PS modification may or may not be present
  source 1..100: mol_type = other RNA
ggatgtattgagcatgcgatgttttagagctagaaatagcaagttaaaataaggctagtccgttatcaacttgaaaaagtggcaccgagtcggtgctttt

SEQ ID NO: 459 - RNA, 100 nt, synthetic construct
  misc_feature 1..100: note = Synthetic
  modified_base 1..100: mod_base = OTHER; note = 2'-O-Me and PS modification may or may not be present
  source 1..100: mol_type = other RNA
acggccatcctcggcgtctggttttagagctagaaatagcaagttaaaataaggctagtccgttatcaacttgaaaaagtggcaccgagtcggtgctttt

SEQ ID NO: 460 - RNA, 100 nt, synthetic construct
  misc_feature 1..100: note = Synthetic
  modified_base 1..100: mod_base = OTHER; note = 2'-O-Me and PS modification may or may not be present
  source 1..100: mol_type = other RNA
gacggccatcctcggcgtctgttttagagctagaaatagcaagttaaaataaggctagtccgttatcaacttgaaaaagtggcaccgagtcggtgctttt

SEQ ID NO: 461 - RNA, 100 nt, synthetic construct
  misc_feature 1..100: note = Synthetic
  modified_base 1..100: mod_base = OTHER; note = 2'-O-Me and PS modification may or may not be present
  source 1..100: mol_type = other RNA
gacgccgaggatggccgtcagttttagagctagaaatagcaagttaaaataaggctagtccgttatcaacttgaaaaagtggcaccgagtcggtgctttt

SEQ ID NO: 462 - RNA, 100 nt, synthetic construct
  misc_feature 1..100: note = Synthetic
  modified_base 1..100: mod_base = OTHER; note = 2'-O-Me and PS modification may or may not be present
  source 1..100: mol_type = other RNA
tgacggccatcctcggcgtcgttttagagctagaaatagcaagttaaaataaggctagtccgttatcaacttgaaaaagtggcaccgagtcggtgctttt

SEQ ID NO: 463 - RNA, 100 nt, synthetic construct
  misc_feature 1..100: note = Synthetic
  modified_base 1..100: mod_base = OTHER; note = 2'-O-Me and PS modification may or may not be present
  source 1..100: mol_type = other RNA
ggcgccatgacggccatcctgttttagagctagaaatagcaagttaaaataaggctagtccgttatcaacttgaaaaagtggcaccgagtcggtgctttt

SEQ ID NO: 464 - RNA, 100 nt, synthetic construct
  misc_feature 1..100: note = Synthetic
  modified_base 1..100: mod_base = OTHER; note = 2'-O-Me and PS modification may or may not be present
  source 1..100: mol_type = other RNA
acagcgacgccgcgagccaggttttagagctagaaatagcaagttaaaataaggctagtccgttatcaacttgaaaaagtggcaccgagtcggtgctttt

SEQ ID NO: 465 - RNA, 100 nt, synthetic construct
  misc_feature 1..100: note = Synthetic
  modified_base 1..100: mod_base = OTHER; note = 2'-O-Me and PS modification may or may not be present
  source 1..100: mol_type = other RNA
cgacgccgcgagccagaggagttttagagctagaaatagcaagttaaaataaggctagtccgttatcaacttgaaaaagtggcaccgagtcggtgctttt

SEQ ID NO: 466 - RNA, 100 nt, synthetic construct
  misc_feature 1..100: note = Synthetic
  modified_base 1..100: mod_base = OTHER; note = 2'-O-Me and PS modification may or may not be present
  source 1..100: mol_type = other RNA
cgagccagaggatggagccggttttagagctagaaatagcaagttaaaataaggctagtccgttatcaacttgaaaaagtggcaccgagtcggtgctttt

SEQ ID NO: 467 - RNA, 100 nt, synthetic construct
  misc_feature 1..100: note = Synthetic
  modified_base 1..100: mod_base = OTHER; note = 2'-O-Me and PS modification may or may not be present
  source 1..100: mol_type = other RNA
cggctccatcctctggctcggttttagagctagaaatagcaagttaaaataaggctagtccgttatcaacttgaaaaagtggcaccgagtcggtgctttt

SEQ ID NO: 468 - RNA, 100 nt, synthetic construct
  misc_feature 1..100: note = Synthetic
  modified_base 1..100: mod_base = OTHER; note = 2'-O-Me and PS modification may or may not be present
  source 1..100: mol_type = other RNA
gagccagaggatggagccgcgttttagagctagaaatagcaagttaaaataaggctagtccgttatcaacttgaaaaagtggcaccgagtcggtgctttt

SEQ ID NO: 469 - RNA, 100 nt, synthetic construct
  misc_feature 1..100: note = Synthetic
  modified_base 1..100: mod_base = OTHER; note = 2'-O-Me and PS modification may or may not be present
  source 1..100: mol_type = other RNA
gcgcccgcggctccatcctcgttttagagctagaaatagcaagttaaaataaggctagtccgttatcaacttgaaaaagtggcaccgagtcggtgctttt

SEQ ID NO: 470 - RNA, 100 nt, synthetic construct
  misc_feature 1..100: note = Synthetic
  modified_base 1..100: mod_base = OTHER; note = 2'-O-Me and PS modification may or may not be present
  source 1..100: mol_type = other RNA
gcccgtccgtgggggatgaggttttagagctagaaatagcaagttaaaataaggctagtccgttatcaacttgaaaaagtggcaccgagtcggtgctttt

SEQ ID NO: 471 - RNA, 100 nt, synthetic construct
  misc_feature 1..100: note = Synthetic
  modified_base 1..100: mod_base = OTHER; note = 2'-O-Me and PS modification may or may not be present
  source 1..100: mol_type = other RNA
tcatcccccacggacgggccgttttagagctagaaatagcaagttaaaataaggctagtccgttatcaacttgaaaaagtggcaccgagtcggtgctttt

SEQ ID NO: 472 - RNA, 100 nt, synthetic construct
  misc_feature 1..100: note = Synthetic
  modified_base 1..100: mod_base = OTHER; note = 2'-O-Me and PS modification may or may not be present
  source 1..100: mol_type = other RNA
atctcggacccggagactgtgttttagagctagaaatagcaagttaaaataaggctagtccgttatcaacttgaaaaagtggcaccgagtcggtgctttt

SEQ ID NO: 473 - RNA, 100 nt, synthetic construct
  misc_feature 1..100: note = Synthetic
  modified_base 1..100: mod_base = OTHER; note = 2'-O-Me and PS modification may or may not be present
  source 1..100: mol_type = other RNA
ggggtcccgcggcttcgggggttttagagctagaaatagcaagttaaaataaggctagtccgttatcaacttgaaaaagtggcaccgagtcggtgctttt

SEQ ID NO: 474 - RNA, 100 nt, synthetic construct
  misc_feature 1..100: note = Synthetic
  modified_base 1..100: mod_base = OTHER; note = 2'-O-Me and PS modification may or may not be present
  source 1..100: mol_type = other RNA
ctcggggtcccgcggcttcggttttagagctagaaatagcaagttaaaataaggctagtccgttatcaacttgaaaaagtggcaccgagtcggtgctttt

SEQ ID NO: 475 - RNA, 100 nt, synthetic construct
  misc_feature 1..100: note = Synthetic
  modified_base 1..100: mod_base = OTHER; note = 2'-O-Me and PS modification may or may not be present
  source 1..100: mol_type = other RNA
tctcggggtcccgcggcttcgttttagagctagaaatagcaagttaaaataaggctagtccgttatcaacttgaaaaagtggcaccgagtcggtgctttt

SEQ ID NO: 476 - RNA, 100 nt, synthetic construct
  misc_feature 1..100: note = Synthetic
  modified_base 1..100: mod_base = OTHER; note = 2'-O-Me and PS modification may or may not be present
  source 1..100: mol_type = other RNA
gtctcggggtcccgcggcttgttttagagctagaaatagcaagttaaaataaggctagtccgttatcaacttgaaaaagtggcaccgagtcggtgctttt

SEQ ID NO: 477 - RNA, 100 nt, synthetic construct
  misc_feature 1..100: note = Synthetic
  modified_base 1..100: mod_base = OTHER; note = 2'-O-Me and PS modification may or may not be present
  source 1..100: mol_type = other RNA
gcaagggtctcggggtcccggttttagagctagaaatagcaagttaaaataaggctagtccgttatcaacttgaaaaagtggcaccgagtcggtgctttt

SEQ ID NO: 478 - RNA, 100 nt, synthetic construct
  misc_feature 1..100: note = Synthetic
  modified_base 1..100: mod_base = OTHER; note = 2'-O-Me and PS modification may or may not be present
  source 1..100: mol_type = other RNA
ggaccccgagacccttgcccgttttagagctagaaatagcaagttaaaataaggctagtccgttatcaacttgaaaaagtggcaccgagtcggtgctttt

SEQ ID NO: 479 - RNA, 100 nt, synthetic construct
  misc_feature 1..100: note = Synthetic
  modified_base 1..100: mod_base = OTHER; note = 2'-O-Me and PS modification may or may not be present
  source 1..100: mol_type = other RNA
gaccccgagacccttgccccgttttagagctagaaatagcaagttaaaataaggctagtccgttatcaacttgaaaaagtggcaccgagtcggtgctttt

SEQ ID NO: 480 - RNA, 100 nt, synthetic construct
  misc_feature 1..100: note = Synthetic
  modified_base 1..100: mod_base = OTHER; note = 2'-O-Me and PS modification may or may not be present
  source 1..100: mol_type = other RNA
cgagacccttgccccgggaggttttagagctagaaatagcaagttaaaataaggctagtccgttatcaacttgaaaaagtggcaccgagtcggtgctttt

SEQ ID NO: 481 - RNA, 100 nt, synthetic construct
  misc_feature 1..100: note = Synthetic
  modified_base 1..100: mod_base = OTHER; note = 2'-O-Me and PS modification may or may not be present
  source 1..100: mol_type = other RNA
ctcccggggcaagggtctcggttttagagctagaaatagcaagttaaaataaggctagtccgttatcaacttgaaaaagtggcaccgagtcggtgctttt

SEQ ID NO: 482 - RNA, 100 nt, synthetic construct
  misc_feature 1..100: note = Synthetic
  modified_base 1..100: mod_base = OTHER; note = 2'-O-Me and PS modification may or may not be present
  source 1..100: mol_type = other RNA
tctcccggggcaagggtctcgttttagagctagaaatagcaagttaaaataaggctagtccgttatcaacttgaaaaagtggcaccgagtcggtgctttt

SEQ ID NO: 483 - RNA, 100 nt, synthetic construct
  misc_feature 1..100: note = Synthetic
  modified_base 1..100: mod_base = OTHER; note = 2'-O-Me and PS modification may or may not be present
  source 1..100: mol_type = other RNA
ctctcccggggcaagggtctgttttagagctagaaatagcaagttaaaataaggctagtccgttatcaacttgaaaaagtggcaccgagtcggtgctttt

SEQ ID NO: 484 - RNA, 100 nt, synthetic construct
  misc_feature 1..100: note = Synthetic
  modified_base 1..100: mod_base = OTHER; note = 2'-O-Me and PS modification may or may not be present
  source 1..100: mol_type = other RNA
ccttgccccgggagaggcccgttttagagctagaaatagcaagttaaaataaggctagtccgttatcaacttgaaaaagtggcaccgagtcggtgctttt

SEQ ID NO: 485 - RNA, 100 nt, synthetic construct
  misc_feature 1..100: note = Synthetic
  modified_base 1..100: mod_base = OTHER; note = 2'-O-Me and PS modification may or may not be present
  source 1..100: mol_type = other RNA
ctgggcctctcccggggcaagttttagagctagaaatagcaagttaaaataaggctagtccgttatcaacttgaaaaagtggcaccgagtcggtgctttt

SEQ ID NO: 486 - RNA, 100 nt, synthetic construct
  misc_feature 1..100: note = Synthetic
  modified_base 1..100: mod_base = OTHER; note = 2'-O-Me and PS modification may or may not be present
  source 1..100: mol_type = other RNA
cctgggcctctcccggggcagttttagagctagaaatagcaagttaaaataaggctagtccgttatcaacttgaaaaagtggcaccgagtcggtgctttt

SEQ ID NO: 487 - RNA, 100 nt, synthetic construct
  misc_feature 1..100: note = Synthetic
  modified_base 1..100: mod_base = OTHER; note = 2'-O-Me and PS modification may or may not be present
  source 1..100: mol_type = other RNA
aggcgcctgggcctctcccggttttagagctagaaatagcaagttaaaataaggctagtccgttatcaacttgaaaaagtggcaccgagtcggtgctttt

SEQ ID NO: 488 - RNA, 100 nt, synthetic construct
  misc_feature 1..100: note = Synthetic
  modified_base 1..100: mod_base = OTHER; note = 2'-O-Me and PS modification may or may not be present
  source 1..100: mol_type = other RNA
tttaggccaaaaatccccccgttttagagctagaaatagcaagttaaaataaggctagtccgttatcaacttgaaaaagtggcaccgagtcggtgctttt

SEQ ID NO: 489 - RNA, 100 nt, synthetic construct
  misc_feature 1..100: note = Synthetic
  modified_base 1..100: mod_base = OTHER; note = 2'-O-Me and PS modification may or may not be present
  source 1..100: mol_type = other RNA
aggcattttgcatctgtcatgttttagagctagaaatagcaagttaaaataaggctagtccgttatcaacttgaaaaagtggcaccgagtcggtgctttt

SEQ ID NO: 490 - RNA, 100 nt, synthetic construct
  misc_feature 1..100: note = Synthetic
  modified_base 1..100: mod_base = OTHER; note = 2'-O-Me and PS modification may or may not be present
  source 1..100: mol_type = other RNA
caggcattttgcatctgtcagttttagagctagaaatagcaagttaaaataaggctagtccgttatcaacttgaaaaagtggcaccgagtcggtgctttt

SEQ ID NO: 491 - RNA, 100 nt, synthetic construct
  misc_feature 1..100: note = Synthetic
  modified_base 1..100: mod_base = OTHER; note = 2'-O-Me and PS modification may or may not be present
  source 1..100: mol_type = other RNA
ccctgggcactgtcactgccgttttagagctagaaatagcaagttaaaataaggctagtccgttatcaacttgaaaaagtggcaccgagtcggtgctttt

SEQ ID NO: 492 - RNA, 100 nt, synthetic construct
  misc_feature 1..100: note = Synthetic
  modified_base 1..100: mod_base = OTHER; note = 2'-O-Me and PS modification may or may not be present
  source 1..100: mol_type = other RNA
cgctgcagcgcacgggtaccgttttagagctagaaatagcaagttaaaataaggctagtccgttatcaacttgaaaaagtggcaccgagtcggtgctttt

SEQ ID NO: 493 - RNA, 100 nt, synthetic construct
  misc_feature 1..100: note = Synthetic
  modified_base 1..100: mod_base = OTHER; note = 2'-O-Me and PS modification may or may not be present
  source 1..100: mol_type = other RNA
gctgcagcgcacgggtaccagttttagagctagaaatagcaagttaaaataaggctagtccgttatcaacttgaaaaagtggcaccgagtcggtgctttt

SEQ ID NO: 494 - RNA, 100 nt, synthetic construct
  misc_feature 1..100: note = Synthetic
  modified_base 1..100: mod_base = OTHER; note = 2'-O-Me and PS modification may or may not be present
  source 1..100: mol_type = other RNA
ctgcagcgcacgggtaccaggttttagagctagaaatagcaagttaaaataaggctagtccgttatcaacttgaaaaagtggcaccgagtcggtgctttt

SEQ ID NO: 495 - RNA, 100 nt, synthetic construct
  misc_feature 1..100: note = Synthetic
  modified_base 1..100: mod_base = OTHER; note = 2'-O-Me and PS modification may or may not be present
  source 1..100: mol_type = other RNA
tccttgtgggaggccagcccgttttagagctagaaatagcaagttaaaataaggctagtccgttatcaacttgaaaaagtggcaccgagtcggtgctttt

SEQ ID NO: 496 - RNA, 91 nt, synthetic construct
  misc_feature 1..91: note = Synthetic
  modified_base 1..91: mod_base = OTHER; note = 2'-O-Me and PS modification may or may not be present
  source 1..91: mol_type = other RNA
cttgacgcatcgcgccaggagttttagagctagaaatagcaagttaaaataaggctagtccgttatcacgaaagggcaccgagtcggtgct

SEQ ID NO: 497 - RNA, 100 nt, synthetic construct
  misc_feature 1..100: note = Synthetic
  modified_base 1..100: mod_base = OTHER; note = 2'-O-Me and PS modification may or may not be present
  source 1..100: mol_type = other RNA
aatcctaattgcctcctgcagttttagagctagaaatagcaagttaaaataaggctagtccgttatcaacttgaaaaagtggcaccgagtcggtgctttt

SEQ ID NO: 498 - RNA, 91 nt, synthetic construct
  misc_feature 1..91: note = Synthetic
  modified_base 1..91: mod_base = OTHER; note = 2'-O-Me and PS modification may or may not be present
  source 1..91: mol_type = other RNA
actcacgctggatagcctccgttttagagctagaaatagcaagttaaaataaggctagtccgttatcacgaaagggcaccgagtcggtgct

SEQ ID NO: 499 - RNA, 91 nt, synthetic construct
  misc_feature 1..91: note = Synthetic
  modified_base 1..91: mod_base = OTHER; note = 2'-O-Me and PS modification may or may not be present
  source 1..91: mol_type = other RNA
ttcaaaacctgtcagtgattgttttagagctagaaatagcaagttaaaataaggctagtccgttatcacgaaagggcaccgagtcggtgct

SEQ ID NO: 500 - RNA, 91 nt, synthetic construct
  misc_feature 1..91: note = Synthetic
  modified_base 1..91: mod_base = OTHER; note = 2'-O-Me and PS modification may or may not be present
  source 1..91: mol_type = other RNA
cgcccaggtcctcacgtctggttttagagctagaaatagcaagttaaaataaggctagtccgttatcacgaaagggcaccgagtcggtgct

SEQ ID NO: 501 - RNA, 91 nt, synthetic construct
  misc_feature 1..91: note = Synthetic
  modified_base 1..91: mod_base = OTHER; note = 2'-O-Me and PS modification may or may not be present
  source 1..91: mol_type = other RNA
gctgcagcgcacgggtaccagttttagagctagaaatagcaagttaaaataaggctagtccgttatcacgaaagggcaccgagtcggtgct

SEQ ID NO: 502 - RNA, 91 nt, synthetic construct
  misc_feature 1..91: note = Synthetic
  modified_base 1..91: mod_base = OTHER; note = 2'-O-Me and PS modification may or may not be present
  source 1..91: mol_type = other RNA
ccacacccaaaaggccacacgttttagagctagaaatagcaagttaaaataaggctagtccgttatcacgaaagggcaccgagtcggtgct

SEQ ID NO: 503 - RNA, 101 nt, synthetic construct
  misc_feature 1..101: note = Synthetic
  modified_base 1..101: mod_base = OTHER; note = 2'-O-Me and PS modification may or may not be present
  source 1..101: mol_type = other RNA
gtgtgtccctctccccacccgtccgttgtagctccctgaaaccgttgctacaataaggccgtcgaaagatgtgccgcaacgctctgccttctggcatcgtt

SEQ ID NO: 504 - RNA, 100 nt, synthetic construct
  misc_feature 1..100: note = Synthetic
  modified_base 1..100: mod_base = OTHER; note = 2'-O-Me and PS modification may or may not be present
  source 1..100: mol_type = other RNA
atctgcctttatagggcaccgttttagagctagaaatagcaagttaaaataaggctagtccgttatcaacttgaaaaagtggcaccgagtcggtgctttt

SEQ ID NO: 505 - RNA, 99 nt, synthetic construct
  misc_feature 1..99: note = Synthetic
  modified_base 1..99: mod_base = OTHER; note = 2'-O-Me and PS modification may or may not be present
  source 1..99: mol_type = other RNA
agtcacgatgcctttataggttttagagctagaaatagcaagttaaaataaggctagtccgttatcaacttgaaaaagtggcaccgagtcggtgctttt

SEQ ID NO: 506 - RNA, 100 nt, synthetic construct
  misc_feature 1..100: note = Synthetic
  modified_base 1..100: mod_base = OTHER; note = 2'-O-Me and PS modification may or may not be present
  source 1..100: mol_type = other RNA
ggttgcaaggaatgagaaccgttttagagctagaaatagcaagttaaaataaggctagtccgttatcaacttgaaaaagtggcaccgagtcggtgctttt

SEQ ID NO: 507 - RNA, 101 nt, synthetic construct
  misc_feature 1..101: note = Synthetic
  modified_base 1..101: mod_base = OTHER; note = 2'-O-Me and PS modification may or may not be present
  source 1..101: mol_type = other RNA
ggggccagcttcagacacaaatacgttgtagctccctgaaaccgttgctacaataaggccgtcgaaagatgtgccgcaacgctctgccttctggcatcgtt

SEQ ID NO: 508 - RNA, 101 nt, synthetic construct
  misc_feature 1..101: note = Synthetic
  modified_base 1..101: mod_base = OTHER; note = 2'-O-Me and PS modification may or may not be present
  source 1..101: mol_type = other RNA
cagaattgagagactcagcccagggttgtagctccctgaaaccgttgctacaataaggccgtcgaaagatgtgccgcaacgctctgccttctggcatcgtt

SEQ ID NO: 509 - RNA, 101 nt, synthetic construct
  misc_feature 1..101: note = Synthetic
  modified_base 1..101: mod_base = OTHER; note = 2'-O-Me and PS modification may or may not be present
  source 1..101: mol_type = other RNA
gagaagccgtcacacagatccacagttgtagctccctgaaaccgttgctacaataaggccgtcgaaagatgtgccgcaacgctctgccttctggcatcgtt

SEQ ID NO: 510 - RNA, 93 nt, synthetic construct
  misc_feature 1..93: note = Synthetic
  modified_base 1..93: mod_base = OTHER; note = 2'-O-Me and PS modification may or may not be present
  source 1..93: mol_type = other RNA
ccaagtgtcttccagtacgatttggttgtagctcccttcgaccgttgctacaataaggccgtcgatgtgccgcaacgctctgccggcatcgtt

SEQ ID NO: 511 - RNA, 100 nt, synthetic construct
  misc_feature 1..100: note = Synthetic
  modified_base 1..100: mod_base = OTHER; note = 2'-O-Me and PS modification may or may not be present
  source 1..100: mol_type = other RNA
acacaaataccagtccagcggttttagagctagaaatagcaagttaaaataaggctagtccgttatcaacttgaaaaagtggcaccgagtcggtgctttt

SEQ ID NO: 512 - RNA, 145 nt, synthetic construct
  misc_feature 1..145: note = Synthetic
  variation 1..24: note = n is a, c, g, or u
  variation 21..25: note = n may or may not be present
  source 1..145: mol_type = other RNA
nnnnnnnnnnnnnnnnnnnnnnnngttgtagctccctttctcatttcggaaacgaaatgagaaccgttgctacaataaggccgtctgaaaagatgtgccgcaacgctctgccccttaaagcttctgctttaaggggcatcgttta

SEQ ID NO: 513 - RNA, 102 nt, synthetic construct
  misc_feature 1..102: note = Synthetic
  variation 1..25: note = n is a, c, g, or u
  variation 21..25: note = n may or may not be present
  source 1..102: mol_type = other RNA
nnnnnnnnnnnnnnnnnnnnnnnnngttgtagctccctgaaaccgttgctacaataaggccgtcgaaagatgtgccgcaacgctctgccttctggcatcgtt

SEQ ID NO: 514 - RNA, 106 nt, synthetic construct
  misc_feature 1..106: note = Synthetic
  variation 1..25: note = n is a, c, g, or u
  variation 21..25: note = n may or may not be present
  source 1..106: mol_type = other RNA
nnnnnnnnnnnnnnnnnnnnnnnnngttgtagctccctgaaaccgttgctacaataaggccgtcgaaagatgtgccgcaacgctctgccttctggcatcgtttatt

SEQ ID NO: 515 - RNA, 108 nt, synthetic construct
  misc_feature 1..108: note = Synthetic
  variation 1..25: note = n is a, c, g, or u
  variation 21..25: note = n may or may not be present
  source 1..108: mol_type = other RNA
nnnnnnnnnnnnnnnnnnnnnnnnngttgtagctccctggaaacccgttgctacaataaggccgtcgaaagatgtgccgcaacgctctgccttctggcatcgtttatt

SEQ ID NO: 516 - RNA, 77 nt, synthetic construct
  misc_feature 1..77: note = Synthetic
  modified_base 1..77: mod_base = OTHER; note = 2'-O-Me and PS modification may or may not be present
  source 1..77: mol_type = other RNA
gttgtagctccctgaaaccgttgctacaataaggccgtcgaaagatgtgccgcaacgctctgccttctggcatcgtt

SEQ ID NO: 517 - RNA, 77 nt, synthetic construct; identical to SEQ ID NO: 516
  misc_feature 1..77: note = Synthetic
  modified_base 1..77: mod_base = OTHER; note = 2'-O-Me and PS modification may or may not be present
  source 1..77: mol_type = other RNA

SEQ ID NO: 518 - RNA, 94 nt, synthetic construct
  misc_feature 1..94: note = internal linker L1; note = Synthetic
  variation 1..25: note = n is a, c, g, or u
  variation 21..25: note = n may or may not be present
  source 1..94: mol_type = other RNA
nnnnnnnnnnnnnnnnnnnnnnnnngttgtagctcccttcgaccgttgctacaataaggccgtcgatgtgccgcaacgctctgccggcatcgtt

SEQ ID NO: 519 - RNA, 93 nt, synthetic construct
  misc_feature 1..93: note = Synthetic; note = internal linker L1
  modified_base 1..93: mod_base = OTHER; note = 2'-O-Me and PS modifications may or may not be present
  variation 1..24: note = n is a, c, g, or u
  source 1..93: mol_type = other RNA
nnnnnnnnnnnnnnnnnnnnnnnngttgtagctcccttcgaccgttgctacaataaggccgtcgatgtgccgcaacgctctgccggcatcgtt

SEQ ID NO: 520 - RNA, 91 nt, synthetic construct
  misc_feature 1..91: note = Synthetic
  modified_base 1..91: mod_base = OTHER; note = 2'-O-Me and PS modification may or may not be present
  variation 1..20: note = n is a, c, g, or u
  source 1..91: mol_type = other RNA
nnnnnnnnnnnnnnnnnnnngttttagagctagaaatagcaagttaaaataaggctagtccgttatcacgaaagggcaccgagtcggtgct

SEQ ID NO: 521 - RNA, 91 nt, synthetic construct; identical to SEQ ID NO: 520
  misc_feature 1..91: note = Synthetic
  variation 1..20: note = n is a, c, g, or u
  source 1..91: mol_type = other RNA

SEQ ID NO: 522 - RNA, 101 nt, synthetic construct
  misc_feature 1..101: note = Synthetic
  modified_base 1..101: mod_base = OTHER; note = 2'-O-Me and PS modification may or may not be present
  variation 1..24: note = n is a, c, g, or u
  source 1..101: mol_type = other RNA
nnnnnnnnnnnnnnnnnnnnnnnngttgtagctccctgaaaccgttgctacaataaggccgtcgaaagatgtgccgcaacgctctgccttctggcatcgtt

SEQ ID NO: 523 - RNA, 80 nt, synthetic construct
  misc_feature 1..80: note = internal linkers L1 and L2; note = Synthetic
  modified_base 1..80: mod_base = OTHER; note = 2'-O-Me and PS modifications may or may not be present
  source 1..80: mol_type = other RNA
acgcaaatatcagtccagcggttttagagctatagcaagttaaaataaggcgtccgttatcacgggcaccgagtcggtgc

SEQ ID NO: 524 - RNA, 93 nt, synthetic construct
  misc_feature 1..93: note = Synthetic; note = internal linker L1
  variation 1..20: note = n is a, c, g, or u
  source 1..93: mol_type = other RNA
nnnnnnnnnnnnnnnnnnnngttttagagctatagcaagttaaaataaggctagtccgttatcaacttaagtggcaccgagtcggtgcttttt

SEQ ID NO: 525-528 - skipped (4 entries)

SEQ ID NO: 529 - RNA, 100 nt, synthetic construct
  misc_feature 1..100: note = Synthetic
  modified_base 1..100: mod_base = OTHER; note = 2'-O-Me and PS modification may or may not be present
  source 1..100: mol_type = other RNA
ttcccggcctttttaccttggttttagagctagaaatagcaagttaaaataaggctagtccgttatcaacttgaaaaagtggcaccgagtcggtgctttt

SEQ ID NO: 530 - RNA, 100 nt, synthetic construct
  misc_feature 1..100: note = Synthetic
  modified_base 1..100: mod_base = OTHER; note = 2'-O-Me and PS modification may or may not be present
  source 1..100: mol_type = other RNA
tcaactgcgaccagttcagcgttttagagctagaaatagcaagttaaaataaggctagtccgttatcaacttgaaaaagtggcaccgagtcggtgctttt

SEQ ID NO: 531 - RNA, 100 nt, synthetic construct
  misc_feature 1..100: note = Synthetic
  modified_base 1..100: mod_base = OTHER; note = 2'-O-Me and PS modification may or may not be present
  source 1..100: mol_type = other RNA
agcgcaggcagtggcaggcagttttagagctagaaatagcaagttaaaataaggctagtccgttatcaacttgaaaaagtggcaccgagtcggtgctttt

SEQ ID NO: 532 - RNA, 100 nt, synthetic construct
  misc_feature 1..100: note = Synthetic
  modified_base 1..100: mod_base = OTHER; note = 2'-O-Me and PS modification may or may not be present
  source 1..100: mol_type = other RNA
acctgcaacaacaggattcagttttagagctagaaatagcaagttaaaataaggctagtccgttatcaacttgaaaaagtggcaccgagtcggtgctttt

SEQ ID NO: 533 - RNA, 100 nt, synthetic construct
  misc_feature 1..100: note = Synthetic
  modified_base 1..100: mod_base = OTHER; note = 2'-O-Me and PS modification may or may not be present
  source 1..100: mol_type = other RNA
ccaggaacacctgcaacaacgttttagagctagaaatagcaagttaaaataaggctagtccgttatcaacttgaaaaagtggcaccgagtcggtgctttt

SEQ ID NO: 534 - RNA, 100 nt, synthetic construct
  misc_feature 1..100: note = Synthetic
  modified_base 1..100: mod_base = OTHER; note = 2'-O-Me and PS modification may or may not be present
  source 1..100: mol_type = other RNA
cagcagcaagagcctggagcgttttagagctagaaatagcaagttaaaataaggctagtccgttatcaacttgaaaaagtggcaccgagtcggtgctttt

SEQ ID NO: 535 - RNA, 100 nt, synthetic construct
  misc_feature 1..100: note = Synthetic
  modified_base 1..100: mod_base = OTHER; note = 2'-O-Me and PS modification may or may not be present
  source 1..100: mol_type = other RNA
gcagcagcaagagcctggaggttttagagctagaaatagcaagttaaaataaggctagtccgttatcaacttgaaaaagtggcaccgagtcggtgctttt

SEQ ID NO: 536 - RNA, 100 nt, synthetic construct
  misc_feature 1..100: note = Synthetic
  modified_base 1..100: mod_base = OTHER; note = 2'-O-Me and PS modification may or may not be present
  source 1..100: mol_type = other RNA
caatctcttcttctccagccgttttagagctagaaatagcaagttaaaataaggctagtccgttatcaacttgaaaaagtggcaccgagtcggtgctttt

SEQ ID NO: 537 - RNA, 100 nt, synthetic construct
  misc_feature 1..100: note = Synthetic
  modified_base 1..100: mod_base = OTHER; note = 2'-O-Me and PS modification may or may not be present
  source 1..100: mol_type = other RNA
agcagctcgctgccagccttgttttagagctagaaatagcaagttaaaataaggctagtccgttatcaacttgaaaaagtggcaccgagtcggtgctttt

SEQ ID NO: 538 - RNA, 100 nt, synthetic construct
  misc_feature 1..100: note = Synthetic
  modified_base 1..100: mod_base = OTHER; note = 2'-O-Me and PS modification may or may not be present
  source 1..100: mol_type = other RNA
agctcgctgccagccttcgggttttagagctagaaatagcaagttaaaataaggctagtccgttatcaacttgaaaaagtggcaccgagtcggtgctttt

SEQ ID NO: 539 - RNA, 100 nt, synthetic construct
  misc_feature 1..100: note = Synthetic
  modified_base 1..100: mod_base = OTHER; note = 2'-O-Me and PS modification may or may not be present
  source 1..100: mol_type = other RNA
ctctggaccaggcggccccggttttagagctagaaatagcaagttaaaataaggctagtccgttatcaacttgaaaaagtggcaccgagtcggtgctttt

SEQ ID NO: 540 - RNA, 100 nt, synthetic construct
  misc_feature 1..100: note = Synthetic
  modified_base 1..100: mod_base = OTHER; note = 2'-O-Me and PS modification may or may not be present
  source 1..100: mol_type = other RNA
gcagccctcgacagccccccgttttagagctagaaatagcaagttaaaataaggctagtccgttatcaacttgaaaaagtggcaccgagtcggtgctttt

SEQ ID NO: 541 - RNA, 100 nt, synthetic construct
  misc_feature 1..100: note = Synthetic
  modified_base 1..100: mod_base = OTHER; note = 2'-O-Me and PS modification may or may not be present
  source 1..100: mol_type = other RNA
cagccctcgacagcccccccgttttagagctagaaatagcaagttaaaataaggctagtccgttatcaacttgaaaaagtggcaccgagtcggtgctttt

SEQ ID NO: 542 - RNA, 100 nt, synthetic construct
  misc_feature 1..100: note = Synthetic
  modified_base 1..100: mod_base = OTHER; note = 2'-O-Me and PS modification may or may not be present
  source 1..100: mol_type = other RNA
agccaagtaccccctcccaggttttagagctagaaatagcaagttaaaataaggctagtccgttatcaacttgaaaaagtggcaccgagtcggtgctttt

SEQ ID NO: 543 - RNA, 100 nt, synthetic construct
  misc_feature 1..100: note = Synthetic
  modified_base 1..100: mod_base = OTHER; note = 2'-O-Me and PS modification may or may not be present
  source 1..100: mol_type = other RNA
cagccaacagcacctcagccgttttagagctagaaatagcaagttaaaataaggctagtccgttatcaacttgaaaaagtggcaccgagtcggtgctttt

SEQ ID NO: 544 - RNA, 100 nt, synthetic construct
  misc_feature 1..100: note = Synthetic
  modified_base 1..100: mod_base = OTHER; note = 2'-O-Me and PS modification may or may not be present
  source 1..100: mol_type = other RNA
tgccgcgcccgcagtgtcccgttttagagctagaaatagcaagttaaaataaggctagtccgttatcaacttgaaaaagtggcaccgagtcggtgctttt

SEQ ID NO: 545 - RNA, 100 nt, synthetic construct
  misc_feature 1..100: note = Synthetic
  modified_base 1..100: mod_base = OTHER; note = 2'-O-Me and PS modification may or may not be present
  source 1..100: mol_type = other RNA
cgacagcccccccggggcccgttttagagctagaaatagcaagttaaaataaggctagtccgttatcaacttgaaaaagtggcaccgagtcggtgctttt

SEQ ID NO: 546 - RNA, 100 nt, synthetic construct
  misc_feature 1..100: note = Synthetic
  modified_base 1..100: mod_base = OTHER; note = 2'-O-Me and PS modification may or may not be present
  source 1..100: mol_type = other RNA
ggcagcgagctgctgggcccgttttagagctagaaatagcaagttaaaataaggctagtccgttatcaacttgaaaaagtggcaccgagtcggtgctttt

SEQ ID NO: 547 - RNA, 100 nt, synthetic construct
  misc_feature 1..100: note = Synthetic
  modified_base 1..100: mod_base = OTHER; note = 2'-O-Me and PS modification may or may not be present
  source 1..100: mol_type = other RNA
gccagctctgccagggccccgttttagagctagaaatagcaagttaaaataaggctagtccgttatcaacttgaaaaagtggcaccgagtcggtgctttt

SEQ ID NO: 548 - RNA, 100 nt, synthetic construct
  misc_feature 1..100: note = Synthetic
  modified_base 1..100: mod_base = OTHER; note = 2'-O-Me and PS modification may or may not be present
  source 1..100: mol_type = other RNA
agcgagcgaaggcagggcctgttttagagctagaaatagcaagttaaaataaggctagtccgttatcaacttgaaaaagtggcaccgagtcggtgctttt

SEQ ID NO: 549 - RNA, 100 nt, synthetic construct
  misc_feature 1..100: note = Synthetic
  modified_base 1..100: mod_base = OTHER; note = 2'-O-Me and PS modification may or may not be present
  source 1..100: mol_type = other RNA
aaggctggcagcgagctgctgttttagagctagaaatagcaagttaaaataaggctagtccgttatcaacttgaaaaagtggcaccgagtcggtgctttt

SEQ ID NO: 550 - RNA, 100 nt, synthetic construct
  misc_feature 1..100: note = Synthetic
  modified_base 1..100: mod_base = OTHER; note = 2'-O-Me and PS modification may or may not be present
  source 1..100: mol_type = other RNA
agccctcgacagcccccccggttttagagctagaaatagcaagttaaaataaggctagtccgttatcaacttgaaaaagtggcaccgagtcggtgctttt

SEQ ID NO: 551 - RNA, 100 nt, synthetic construct
  misc_feature 1..100: note = Synthetic
  modified_base 1..100: mod_base = OTHER; note = 2'-O-Me and PS modification may or may not be present
  source 1..100: mol_type = other RNA
ggatgcagcgagcgaaggcagttttagagctagaaatagcaagttaaaataaggctagtccgttatcaacttgaaaaagtggcaccgagtcggtgctttt

SEQ ID NO: 552 - RNA, 100 nt, synthetic construct
  misc_feature 1..100: note = Synthetic
  modified_base 1..100: mod_base = OTHER; note = 2'-O-Me and PS modification may or may not be present
  source 1..100: mol_type = other RNA
tccaccgaggcagccgccgagttttagagctagaaatagcaagttaaaataaggctagtccgttatcaacttgaaaaagtggcaccgagtcggtgctttt

SEQ ID NO: 553 - RNA, 100 nt, synthetic construct
  misc_feature 1..100: note = Synthetic
  modified_base 1..100: mod_base = OTHER; note = 2'-O-Me and PS modification may or may not be present
  source 1..100: mol_type = other RNA
tctccaacaagcttccaaaagttttagagctagaaatagcaagttaaaataaggctagtccgttatcaacttgaaaaagtggcaccgagtcggtgctttt

SEQ ID NO: 554 - RNA, 100 nt, synthetic construct
  misc_feature 1..100: note = Synthetic
  modified_base 1..100: mod_base = OTHER; note = 2'-O-Me and PS modification may or may not be present
  source 1..100: mol_type = other RNA
agcagcccccggagggagcagttttagagctagaaatagcaagttaaaataaggctagtccgttatcaacttgaaaaagtggcaccgagtcggtgctttt

SEQ ID NO: 555 - RNA, 100 nt, synthetic construct
  misc_feature 1..100: note = Synthetic
  modified_base 1..100: mod_base = OTHER; note = 2'-O-Me and PS modification may or may not be present
  source 1..100: mol_type = other RNA
gccacagccctactttgtgcgttttagagctagaaatagcaagttaaaataaggctagtccgttatcaacttgaaaaagtggcaccgagtcggtgctttt

SEQ ID NO: 556 - RNA, 100 nt, synthetic construct
  misc_feature 1..100: note = Synthetic
  modified_base 1..100: mod_base = OTHER; note = 2'-O-Me and PS modification may or may not be present
  source 1..100: mol_type = other RNA
ctgcgcccacgaggccgagggttttagagctagaaatagcaagttaaaataaggctagtccgttatcaacttgaaaaagtggcaccgagtcggtgctttt

SEQ ID NO: 557 - RNA, 100 nt, synthetic construct
  misc_feature 1..100: note = Synthetic
  modified_base 1..100: mod_base = OTHER; note = 2'-O-Me and PS modification may or may not be present
  source 1..100: mol_type = other RNA
cagccgccgatggcccgagtgttttagagctagaaatagcaagttaaaataaggctagtccgttatcaacttgaaaaagtggcaccgagtcggtgctttt

SEQ ID NO: 558 - RNA, 100 nt, synthetic construct
  misc_feature 1..100: note = Synthetic
  modified_base 1..100: mod_base = OTHER; note = 2'-O-Me and PS modification may or may not be present
  source 1..100: mol_type = other RNA
cgaggctccccaatccagaggttttagagctagaaatagcaagttaaaataaggctagtccgttatcaacttgaaaaagtggcaccgagtcggtgctttt

SEQ ID NO: 559 - RNA, 100 nt, synthetic construct
  misc_feature 1..100: note = Synthetic
  modified_base 1..100: mod_base = OTHER; note = 2'-O-Me and PS modification may or may not be present
  source 1..100: mol_type = other RNA
ctcaacgaggaactggagaagttttagagctagaaatagcaagttaaaataaggctagtccgttatcaacttgaaaaagtggcaccgagtcggtgctttt

SEQ ID NO: 560 - RNA, 100 nt, synthetic construct
  misc_feature 1..100: note = Synthetic
  modified_base 1..100: mod_base = OTHER; note = 2'-O-Me and PS modification may or may not be present
  source 1..100: mol_type = other RNA
ccacagccctactttgtgccgttttagagctagaaatagcaagttaaaataaggctagtccgttatcaacttgaaaaagtggcaccgagtcggtgctttt

SEQ ID NO: 561 - RNA, 100 nt, synthetic construct
  misc_feature 1..100: note = Synthetic
  modified_base 1..100: mod_base = OTHER; note = 2'-O-Me and PS modification may or may not be present
  source 1..100: mol_type = other RNA
caagagcctggagcgggaacgttttagagctagaaatagcaagttaaaataaggctagtccgttatcaacttgaaaaagtggcaccgagtcggtgctttt

SEQ ID NO: 562 - RNA, 100 nt, synthetic construct
  misc_feature 1..100: note = Synthetic
  modified_base 1..100: mod_base = OTHER; note = 2'-O-Me and PS modification may or may not be present
  source 1..100: mol_type = other RNA
gactgccagtcaccacagtggttttagagctagaaatagcaagttaaaataaggctagtccgttatcaacttgaaaaagtggcaccgagtcggtgctttt

SEQ ID NO: 563 - RNA, 100 nt, synthetic construct
  misc_feature 1..100: note = Synthetic
  modified_base 1..100: mod_base = OTHER; note = 2'-O-Me and PS modification may or may not be present
  source 1..100: mol_type = other RNA
gcccacgaggccgaggaggcgttttagagctagaaatagcaagttaaaataaggctagtccgttatcaacttgaaaaagtggcaccgagtcggtgctttt

SEQ ID NO: 564 - RNA, 100 nt, synthetic construct
  misc_feature 1..100: note = Synthetic
  modified_base 1..100: mod_base = OTHER; note = 2'-O-Me and PS modification may or may not be present
  source 1..100: mol_type = other RNA
atcagcccagccagaaagcggttttagagctagaaatagcaagttaaaataaggctagtccgttatcaacttgaaaaagtggcaccgagtcggtgctttt

SEQ ID NO: 565 - RNA, 100 nt, synthetic construct
  misc_feature 1..100: note = Synthetic
  modified_base 1..100: mod_base = OTHER; note = 2'-O-Me and PS modification may or may not be present
  source 1..100: mol_type = other RNA
cagagaagacaaagtcgtacgttttagagctagaaatagcaagttaaaataaggctagtccgttatcaacttgaaaaagtggcaccgagtcggtgctttt

SEQ ID NO: 566 - RNA, 100 nt, synthetic construct
  misc_feature 1..100: note = Synthetic
  modified_base 1..100: mod_base = OTHER; note = 2'-O-Me and PS modification may or may not be present
  source 1..100: mol_type = other RNA
tgggagtccctgcagcagcagttttagagctagaaatagcaagttaaaataaggctagtccgttatcaacttgaaaaagtggcaccgagtcggtgctttt

SEQ ID NO: 567 - RNA, 100 nt, synthetic construct
  misc_feature 1..100: note = Synthetic
  modified_base 1..100: mod_base = OTHER; note = 2'-O-Me and PS modification may or may not be present
  source 1..100: mol_type = other RNA
cagcaggctgttgtgtgacagttttagagctagaaatagcaagttaaaataaggctagtccgttatcaacttgaaaaagtggcaccgagtcggtgctttt

SEQ ID NO: 568 - RNA, 100 nt, synthetic construct
  misc_feature 1..100: note = Synthetic
  modified_base 1..100: mod_base = OTHER; note = 2'-O-Me and PS modification may or may not be present
  source 1..100: mol_type = other RNA
ctggtcagggcaagagctatgttttagagctagaaatagcaagttaaaataaggctagtccgttatcaacttgaaaaagtggcaccgagtcggtgctttt

SEQ ID NO: 569 - RNA, 100 nt, synthetic construct
  misc_feature 1..100: note = Synthetic
  modified_base 1..100: mod_base = OTHER; note = 2'-O-Me and PS modification may or may not be present
  source 1..100: mol_type = other RNA
caggttcaggcatgctgggcgttttagagctagaaatagcaagttaaaataaggctagtccgttatcaacttgaaaaagtggcaccgagtcggtgctttt

SEQ ID NO: 570 - RNA, 100 nt, synthetic construct
  misc_feature 1..100: note = Synthetic
  modified_base 1..100: mod_base = OTHER; note = 2'-O-Me and PS modification may or may not be present
  source 1..100: mol_type = other RNA
tttccaaggacttcagctgggttttagagctagaaatagcaagttaaaataaggctagtccgttatcaacttgaaaaagtggcaccgagtcggtgctttt

SEQ ID NO: 571 - RNA, 100 nt, synthetic construct
  misc_feature 1..100: note = Synthetic
  modified_base 1..100: mod_base = OTHER; note = 2'-O-Me and PS modification may or may not be present
  source 1..100: mol_type = other RNA
aggccgaggaggctggaattgttttagagctagaaatagcaagttaaaataaggctagtccgttatcaacttgaaaaagtggcaccgagtcggtgctttt

SEQ ID NO: 572 - RNA, 100 nt, synthetic construct
  misc_feature 1..100: note = Synthetic
  modified_base 1..100: mod_base = OTHER; note = 2'-O-Me and PS modification may or may not be present
  source 1..100: mol_type = other RNA
cagtggctgatggagcgaaggttttagagctagaaatagcaagttaaaataaggctagtccgttatcaacttgaaaaagtggcaccgagtcggtgctttt

SEQ ID NO: 573 - RNA, 100 nt, synthetic construct
  misc_feature 1..100: note = Synthetic
  modified_base 1..100: mod_base = OTHER; note = 2'-O-Me and PS modification may or may not be present
  source 1..100: mol_type = other RNA
gggatgcagcgagcgaaggcgttttagagctagaaatagcaagttaaaataaggctagtccgttatcaacttgaaaaagtggcaccgagtcggtgctttt

SEQ ID NO: 574 - RNA, 100 nt, synthetic construct
  misc_feature 1..100: note = Synthetic
  modified_base 1..100: mod_base = OTHER; note = 2'-O-Me and PS modification may or may not be present
  source 1..100: mol_type = other RNA
aagctgccctccacgctcacgttttagagctagaaatagcaagttaaaataaggctagtccgttatcaacttgaaaaagtggcaccgagtcggtgctttt

SEQ ID NO: 575 - RNA, 100 nt, synthetic construct
  misc_feature 1..100: note = Synthetic
  modified_base 1..100: mod_base = OTHER; note = 2'-O-Me and PS modification may or may not be present
  source 1..100: mol_type = other RNA
ttcctcctgcaatgcttcctgttttagagctagaaatagcaagttaaaataaggctagtccgttatcaacttgaaaaagtggcaccgagtcggtgctttt

SEQ ID NO: 576 - RNA, 100 nt, synthetic construct
  misc_feature 1..100: note = Synthetic
  modified_base 1..100: mod_base = OTHER; note = 2'-O-Me and PS modification may or may not be present
  source 1..100: mol_type = other RNA
tcctcctgcaatgcttcctggttttagagctagaaatagcaagttaaaataaggctagtccgttatcaacttgaaaaagtggcaccgagtcggtgctttt

SEQ ID NO: 577 - RNA, 100 nt, synthetic construct
  misc_feature 1..100: note = Synthetic
  modified_base 1..100: mod_base = OTHER; note = 2'-O-Me and PS modification may or may not be present
  source 1..100: mol_type = other RNA
caagctgccctccacgctcagttttagagctagaaatagcaagttaaaataaggctagtccgttatcaacttgaaaaagtggcaccgagtcggtgctttt

SEQ ID NO: 578 - RNA, 100 nt, synthetic construct
  misc_feature 1..100: note = Synthetic
  modified_base 1..100: mod_base = OTHER; note = 2'-O-Me and PS modification may or may not be present
  source 1..100: mol_type = other RNA
tccctggacctccgcagcacgttttagagctagaaatagcaagttaaaataaggctagtccgttatcaacttgaaaaagtggcaccgagtcggtgctttt

SEQ ID NO: 579 - RNA, 100 nt, synthetic construct
  misc_feature 1..100: note = Synthetic
  modified_base 1..100: mod_base = OTHER; note = 2'-O-Me and PS modification may or may not be present
  source 1..100: mol_type = other RNA
tccagcctcctcggcctcgtgttttagagctagaaatagcaagttaaaataaggctagtccgttatcaacttgaaaaagtggcaccgagtcggtgctttt

SEQ ID NO: 580 - RNA, 100 nt, synthetic construct
  misc_feature 1..100: note = Synthetic
  modified_base 1..100: mod_base = OTHER; note = 2'-O-Me and PS modification may or may not be present
  source 1..100: mol_type = other RNA
cttctccagccaggtccatcgttttagagctagaaatagcaagttaaaataaggctagtccgttatcaacttgaaaaagtggcaccgagtcggtgctttt

SEQ ID NO: 581 - RNA, 100 nt, synthetic construct
  misc_feature 1..100: note = Synthetic
  modified_base 1..100: mod_base = OTHER; note = 2'-O-Me and PS modification may or may not be present
  source 1..100: mol_type = other RNA
cttcctcctgcaatgcttccgttttagagctagaaatagcaagttaaaataaggctagtccgttatcaacttgaaaaagtggcaccgagtcggtgctttt

SEQ ID NO: 582 - RNA, 100 nt, synthetic construct
  misc_feature 1..100: note = Synthetic
  modified_base 1..100: mod_base = OTHER; note = 2'-O-Me and PS modification may or may not be present
  source 1..100: mol_type = other RNA
cgtcctccccaagctccagcgttttagagctagaaatagcaagttaaaataaggctagtccgttatcaacttgaaaaagtggcaccgagtcggtgctttt

SEQ ID NO: 583 - RNA, 100 nt, synthetic construct
  misc_feature 1..100: note = Synthetic
  modified_base 1..100: mod_base = OTHER; note = 2'-O-Me and PS modification may or may not be present
  source 1..100: mol_type = other RNA
ccagctcctcgaagccgtctgttttagagctagaaatagcaagttaaaataaggctagtccgttatcaacttgaaaaagtggcaccgagtcggtgctttt

SEQ ID NO: 584 - RNA, 100 nt, synthetic construct
  misc_feature 1..100: note = Synthetic
  modified_base 1..100: mod_base = OTHER; note = 2'-O-Me and PS modification may or may not be present
  source 1..100: mol_type = other RNA
cttttcctccctgcagcatcgttttagagctagaaatagcaagttaaaataaggctagtccgttatcaacttgaaaaagtggcaccgagtcggtgctttt

SEQ ID NO: 585 - RNA, 100 nt, synthetic construct
  misc_feature 1..100: note = Synthetic
  modified_base 1..100: mod_base = OTHER; note = 2'-O-Me and PS modification may or may not be present
  source 1..100: mol_type = other RNA
cggccgccacgagtggctgtgttttagagctagaaatagcaagttaaaataaggctagtccgttatcaacttgaaaaagtggcaccgagtcggtgctttt

SEQ ID NO: 586 - RNA, 100 nt, synthetic construct
  misc_feature 1..100: note = Synthetic
  modified_base 1..100: mod_base = OTHER; note = 2'-O-Me and PS modification may or may not be present
  source 1..100: mol_type = other RNA
cgcccaggtcctcacgtctggttttagagctagaaatagcaagttaaaataaggctagtccgttatcaacttgaaaaagtggcaccgagtcggtgctttt

SEQ ID NO: 587 - RNA, 100 nt, synthetic construct
  misc_feature 1..100: note = Synthetic
  modified_base 1..100: mod_base = OTHER; note = 2'-O-Me and PS modification may or may not be present
  source 1..100: mol_type = other RNA
cacgtgcggaccggcaccgggttttagagctagaaatagcaagttaaaataaggctagtccgttatcaacttgaaaaagtggcaccgagtcggtgctttt

SEQ ID NO: 588 - RNA, 100 nt, synthetic construct
  misc_feature 1..100: note = Synthetic
  modified_base 1..100: mod_base = OTHER; note = 2'-O-Me and PS modification may or may not be present
  source 1..100: mol_type = other RNA
cagcttggccagctctgccagttttagagctagaaatagcaagttaaaataaggctagtccgttatcaacttgaaaaagtggcaccgagtcggtgctttt

SEQ ID NO: 589 - RNA, 100 nt, synthetic construct
  misc_feature 1..100: note = Synthetic
  modified_base 1..100: mod_base = OTHER; note = 2'-O-Me and PS modification may or may not be present
  source 1..100: mol_type = other RNA
tcggactctgcggcccgcgggttttagagctagaaatagcaagttaaaataaggctagtccgttatcaacttgaaaaagtggcaccgagtcggtgctttt

SEQ ID NO: 590 - RNA, 100 nt, synthetic construct
  misc_feature 1..100: note = Synthetic
  modified_base 1..100: mod_base = OTHER; note = 2'-O-Me and PS modification may or may not be present
  source 1..100: mol_type = other RNA
cttcccccagctgaagtcctgttttagagctagaaatagcaagttaaaataaggctagtccgttatcaacttgaaaaagtggcaccgagtcggtgctttt

SEQ ID NO: 591 - RNA, 100 nt, synthetic construct
  misc_feature 1..100: note = Synthetic
  modified_base 1..100: mod_base = OTHER; note = 2'-O-Me and PS modification may or may not be present
  source 1..100: mol_type = other RNA
gcccagctcccaggccagctgttttagagctagaaatagcaagttaaaataaggctagtccgttatcaacttgaaaaagtggcaccgagtcggtgctttt

SEQ ID NO: 592 - RNA, 100 nt, synthetic construct
  misc_feature 1..100: note = Synthetic
  modified_base 1..100: mod_base = OTHER; note = 2'-O-Me and PS modification may or may not be present
  source 1..100: mol_type = other RNA
ccctccagccagttgtcatagttttagagctagaaatagcaagttaaaataaggctagtccgttatcaacttgaaaaagtggcaccgagtcggtgctttt

SEQ ID NO: 593 - RNA, 100 nt, synthetic construct
  misc_feature 1..100: note = Synthetic
  modified_base 1..100: mod_base = OTHER; note = 2'-O-Me and PS modification may or may not be present
  source 1..100: mol_type = other RNA
gccctccagccagttgtcatgttttagagctagaaatagcaagttaaaataaggctagtccgttatcaacttgaaaaagtggcaccgagtcggtgctttt

SEQ ID NO: 594 - RNA, 100 nt, synthetic construct
  misc_feature 1..100: note = Synthetic
  modified_base 1..100: mod_base = OTHER; note = 2'-O-Me and PS modification may or may not be present
  source 1..100: mol_type = other RNA
ccctgacgctcctccgggacgttttagagctagaaatagcaagttaaaataaggctagtccgttatcaacttgaaaaagtggcaccgagtcggtgctttt

SEQ ID NO: 595 - RNA, 100 nt, synthetic construct
  misc_feature 1..100: note = Synthetic
  modified_base 1..100: mod_base = OTHER; note = 2'-O-Me and PS modification may or may not be present
  source 1..100: mol_type = other RNA
cacactgcccggcacaaagtgttttagagctagaaatagcaagttaaaataaggctagtccgttatcaacttgaaaaagtggcaccgagtcggtgctttt

SEQ ID NO: 596 - RNA, 100 nt, synthetic construct
  misc_feature 1..100: note = Synthetic
  modified_base 1..100: mod_base = OTHER; note = 2'-O-Me and PS modification may or may not be present
  source 1..100: mol_type = other RNA
cagctcacagtgtgccaccagttttagagctagaaatagcaagttaaaataaggctagtccgttatcaacttgaaaaagtggcaccgagtcggtgctttt

SEQ ID NO: 597 - RNA, 100 nt, synthetic construct
  misc_feature 1..100: note = Synthetic
  modified_base 1..100: mod_base = OTHER; note = 2'-O-Me and PS modification may or may not be present
  source 1..100: mol_type = other RNA
agctcggactctgcggcccggttttagagctagaaatagcaagttaaaataaggctagtccgttatcaacttgaaaaagtggcaccgagtcggtgctttt

SEQ ID NO: 598 - RNA, 100 nt, synthetic construct
  misc_feature 1..100: note = Synthetic
  modified_base 1..100: mod_base = OTHER; note = 2'-O-Me and PS modifications
  source 1..100: mol_type = other RNA
gacgccctatttgagctgtcgttttagagctagaaatagcaagttaaaataaggctagtccgttatcaacttgaaaaagtggcaccgagtcggtgctttt

SEQ ID NO: 599 - RNA, 100 nt, synthetic construct
  misc_feature 1..100: note = Synthetic
  modified_base 1..100: mod_base = OTHER; note = 2'-O-Me and PS modification may or may not be present
  source 1..100: mol_type = other RNA
gccagtgctgcggaggtccagttttagagctagaaatagcaagttaaaataaggctagtccgttatcaacttgaaaaagtggcaccgagtcggtgctttt

SEQ ID NO: 600 - RNA, 100 nt, synthetic construct
  misc_feature 1..100: note = Synthetic
  modified_base 1..100: mod_base = OTHER; note = 2'-O-Me and PS modification may or may not be present
  source 1..100: mol_type = other RNA
agggctcccaggcagcgggcgttttagagctagaaatagcaagttaaaataaggctagtccgttatcaacttgaaaaagtggcaccgagtcggtgctttt

SEQ ID NO: 601 - RNA, 100 nt, synthetic construct
  misc_feature 1..100: note = Synthetic
  modified_base 1..100: mod_base = OTHER; note = 2'-O-Me and PS modification may or may not be present
  source 1..100: mol_type = other RNA
gccgagcccgcaggcccggagttttagagctagaaatagcaagttaaaataaggctagtccgttatcaacttgaaaaagtggcaccgagtcggtgctttt

SEQ ID NO: 602 - RNA, 100 nt, synthetic construct
  misc_feature 1..100: note = Synthetic
  modified_base 1..100: mod_base = OTHER; note = 2'-O-Me and PS modification may or may not be present
  source 1..100: mol_type = other RNA
gctcccaggcagcgggcggggttttagagctagaaatagcaagttaaaataaggctagtccgttatcaacttgaaaaagtggcaccgagtcggtgctttt

SEQ ID NO: 603 - RNA, 100 nt, synthetic construct
  misc_feature 1..100: note = Synthetic
  modified_base 1..100: mod_base = OTHER; note = 2'-O-Me and PS modification may or may not be present
  source 1..100: mol_type = other RNA
cctctccagctgccgggcatgttttagagctagaaatagcaagttaaaataaggctagtccgttatcaacttgaaaaagtggcaccgagtcggtgctttt

SEQ ID NO: 604 - RNA, 100 nt, synthetic construct
  misc_feature 1..100: note = Synthetic
  modified_base 1..100: mod_base = OTHER; note = 2'-O-Me and PS modification may or may not be present
  source 1..100: mol_type = other RNA
aggctttccccaaactggtggttttagagctagaaatagcaagttaaaataaggctagtccgttatcaacttgaaaaagtggcaccgagtcggtgctttt

SEQ ID NO: 605 - RNA, 100 nt, synthetic construct
  misc_feature 1..100: note = Synthetic
  modified_base 1..100: mod_base = OTHER; note = 2'-O-Me and PS modification may or may not be present
  source 1..100: mol_type = other RNA
ccatctccactctgccccatgttttagagctagaaatagcaagttaaaataaggctagtccgttatcaacttgaaaaagtggcaccgagtcggtgctttt

SEQ ID NO: 606 - RNA, 100 nt, synthetic construct
  misc_feature 1..100: note = Synthetic
  modified_base 1..100: mod_base = OTHER; note = 2'-O-Me and PS modification may or may not be present
  source 1..100: mol_type = other RNA
tcctcctcacagcccggcccgttttagagctagaaatagcaagttaaaataaggctagtccgttatcaacttgaaaaagtggcaccgagtcggtgctttt

SEQ ID NO: 607 - RNA, 100 nt, synthetic construct
  misc_feature 1..100: note = Synthetic
  modified_base 1..100: mod_base = OTHER; note = 2'-O-Me and PS modification may or may not be present
  source 1..100: mol_type = other RNA
ccactctgccccatgggctcgttttagagctagaaatagcaagttaaaataaggctagtccgttatcaacttgaaaaagtggcaccgagtcggtgctttt

SEQ ID NO: 608 - RNA, 100 nt, synthetic construct
  misc_feature 1..100: note = Synthetic
  modified_base 1..100: mod_base = OTHER; note = 2'-O-Me and PS modification may or may not be present
  source 1..100: mol_type = other RNA
cagcctcccgcccgctgcctgttttagagctagaaatagcaagttaaaataaggctagtccgttatcaacttgaaaaagtggcaccgagtcggtgctttt

SEQ ID NO: 609 - RNA, 100 nt, synthetic construct
  misc_feature 1..100: note = Synthetic
  modified_base 1..100: mod_base = OTHER; note = 2'-O-Me and PS modification may or may not be present
  source 1..100: mol_type = other RNA
cccggccgcctctcttttctgttttagagctagaaatagcaagttaaaataaggctagtccgttatcaacttgaaaaagtggcaccgagtcggtgctttt

SEQ ID NO: 610 - RNA, 100 nt, synthetic construct
  misc_feature 1..100: note = Synthetic
  modified_base 1..100: mod_base = OTHER; note = 2'-O-Me and PS modification may or may not be present
  source 1..100: mol_type = other RNA
cctgggcccacagccactcggttttagagctagaaatagcaagttaaaataaggctagtccgttatcaacttgaaaaagtggcaccgagtcggtgctttt

SEQ ID NO: 611 - RNA, 100 nt, synthetic construct
  misc_feature 1..100: note = Synthetic
  modified_base 1..100: mod_base = OTHER; note = 2'-O-Me and PS modification may or may not be present
  source 1..100: mol_type = other RNA
tccccggctgcagccgcttcgttttagagctagaaatagcaagttaaaataaggctagtccgttatcaacttgaaaaagtggcaccgagtcggtgctttt

SEQ ID NO: 612 - RNA, 100 nt, synthetic construct
  misc_feature 1..100: note = Synthetic
  modified_base 1..100: mod_base = OTHER; note = 2'-O-Me and PS modification may or may not be present
  source 1..100: mol_type = other RNA
cgcgttctgctcatcctagagttttagagctagaaatagcaagttaaaataaggctagtccgttatcaacttgaaaaagtggcaccgagtcggtgctttt

SEQ ID NO: 613 - RNA, 100 nt, synthetic construct
  misc_feature 1..100: note = Synthetic
  modified_base 1..100: mod_base = OTHER; note = 2'-O-Me and PS modification may or may not be present
  source 1..100: mol_type = other RNA
ttccacatccttcagggactgttttagagctagaaatagcaagttaaaataaggctagtccgttatcaacttgaaaaagtggcaccgagtcggtgctttt

SEQ ID NO: 614 - RNA, 100 nt, synthetic construct
  misc_feature 1..100: note = Synthetic
  modified_base 1..100: mod_base = OTHER; note = 2'-O-Me and PS modification may or may not be present
  source 1..100: mol_type = other RNA
ctctccagctgccgggcattgttttagagctagaaatagcaagttaaaataaggctagtccgttatcaacttgaaaaagtggcaccgagtcggtgctttt

SEQ ID NO: 615 - RNA, 100 nt, synthetic construct
  misc_feature 1..100: note = Synthetic
  modified_base 1..100: mod_base = OTHER; note = 2'-O-Me and PS modification may or may not be present
  source 1..100: mol_type = other RNA
gggcccacagccactcgtgggttttagagctagaaatagcaagttaaaataaggctagtccgttatcaacttgaaaaagtggcaccgagtcggtgctttt

SEQ ID NO: 616 - RNA, 100 nt, synthetic construct
  misc_feature 1..100: note = Synthetic
  modified_base 1..100: mod_base = OTHER; note = 2'-O-Me and PS modification may or may not be present
  source 1..100: mol_type = other RNA
ccccggccgcctctcttttcgttttagagctagaaatagcaagttaaaataaggctagtccgttatcaacttgaaaaagtggcaccgagtcggtgctttt

SEQ ID NO: 617 - RNA, 100 nt, synthetic construct
  misc_feature 1..100: note = Synthetic
  modified_base 1..100: mod_base = OTHER; note = 2'-O-Me and PS modification may or may not be present
  source 1..100: mol_type = other RNA
tccagctgccgggcattggggttttagagctagaaatagcaagttaaaataaggctagtccgttatcaacttgaaaaagtggcaccgagtcggtgctttt

SEQ ID NO: 618 - RNA, 20 nt, synthetic construct
  misc_feature 1..20: note = Synthetic
  source 1..20: mol_type = other RNA
ccacacccaaaaggccacac

SEQ ID NO: 619 - RNA, 20 nt, synthetic construct
  misc_feature 1..20: note = Synthetic
  source 1..20: mol_type = other RNA
cccaccagctcagctccacg

SEQ ID NO: 620 - RNA, 20 nt, synthetic construct
  misc_feature 1..20: note = Synthetic
  source 1..20: mol_type = other RNA
tccctagcaggatctcatag

SEQ ID NO: 621 - RNA, 20 nt, synthetic construct
  misc_feature 1..20: note = Synthetic
  source 1..20: mol_type = other RNA
ggctcaaacacagcgacctc

SEQ ID NO: 622 - RNA, 20 nt, synthetic construct
  misc_feature 1..20: note = Synthetic
  source 1..20: mol_type = other RNA
ggcacaccagtgtggccttt

SEQ ID NO: 623 - RNA, 20 nt, synthetic construct
  misc_feature 1..20: note = Synthetic
  source 1..20: mol_type = other RNA
aggtggccgagaccctcagg

SEQ ID NO: 624 - RNA, 20 nt, synthetic construct
  misc_feature 1..20: note = Synthetic
  source 1..20: mol_type = other RNA
acctgctctaccccaggcct

SEQ ID NO: 625 - RNA, 20 nt, synthetic construct
  misc_feature 1..20: note = Synthetic
  source 1..20: mol_type = other RNA
catagaggatggtggcagac

SEQ ID NO: 626 - RNA, 20 nt, synthetic construct
  misc_feature 1..20: note = Synthetic
  source 1..20: mol_type = other RNA
ccacgtggagctgagctggt

SEQ ID NO: 627 - RNA, 20 nt, synthetic construct
  misc_feature 1..20: note = Synthetic
  source 1..20: mol_type = other RNA
ggagaatgacgagtggaccc

SEQ ID NO: 628 - RNA, 20 nt, synthetic construct
  misc_feature 1..20: note = Synthetic
  source 1..20: mol_type = other RNA
ccagtgtggccttttgggtg

SEQ ID NO: 629 - RNA, 20 nt, synthetic construct
  misc_feature 1..20: note = Synthetic
  source 1..20: mol_type = other RNA
caaacacagcgacctcgggt

SEQ ID NO: 630 - RNA, 20 nt, synthetic construct
  misc_feature 1..20: note = Synthetic
  source 1..20: mol_type = other RNA
taccatggccatcaacacaa

SEQ ID NO: 631 - RNA, 20 nt, synthetic construct
  misc_feature 1..20: note = Synthetic
  source 1..20: mol_type = other RNA
gcgctgacgatctgggtgac

SEQ ID NO: 632 - RNA, 20 nt, synthetic construct
  misc_feature 1..20: note = Synthetic
  source 1..20: mol_type = other RNA
cacggacccgcagcccctca

SEQ ID NO: 633 - RNA, 20 nt, synthetic construct
  misc_feature 1..20: note = Synthetic
  source 1..20: mol_type = other RNA
tcaaacacagcgacctcggg

SEQ ID NO: 634 - RNA, 20 nt, synthetic construct
  misc_feature 1..20: note = Synthetic
  source 1..20: mol_type = other RNA
cagggaagaagcctgtggcc

SEQ ID NO: 635 - RNA, 20 nt, synthetic construct
  misc_feature 1..20: note = Synthetic
  source 1..20: mol_type = other RNA
cagtgtggccttttgggtgt

SEQ ID NO: 636 - RNA, 20 nt, synthetic construct
  misc_feature 1..20: note = Synthetic
  source 1..20: mol_type = other RNA
accacgtggagctgagctgg

SEQ ID NO: 637 - RNA, 20 nt, synthetic construct
  misc_feature 1..20: note = Synthetic
  source 1..20: mol_type = other RNA
gagggcgggctgctccttga

SEQ ID NO: 638 - RNA, 20 nt, synthetic construct
  misc_feature 1..20: note = Synthetic
  source 1..20: mol_type = other RNA
agctcagctccacgtggtca

SEQ ID NO: 639 - RNA, 20 nt, synthetic construct
  misc_feature 1..20: note = Synthetic
  source 1..20: mol_type = other RNA
gaacaaggtgttcccacccg

SEQ ID NO: 640 - RNA, 20 nt, synthetic construct
  misc_feature 1..20: note = Synthetic
  source 1..20: mol_type = other RNA
gcacaccagtgtggcctttt

SEQ ID NO: 641 - RNA, 20 nt, synthetic construct
  misc_feature 1..20: note = Synthetic
  source 1..20: mol_type = other RNA
gagctggtgggtgaatggga

SEQ ID NO: 642 - RNA, 20 nt, synthetic construct
  misc_feature 1..20: note = Synthetic
  source 1..20: mol_type = other RNA
ggctgctccttgaggggctg

SEQ ID NO: 643 - RNA, 20 nt, synthetic construct
  misc_feature 1..20: note = Synthetic
  source 1..20: mol_type = other RNA
cgggtgggaacaccttgttc

SEQ ID NO: 644 - RNA, 20 nt, synthetic construct
  misc_feature 1..20: note = Synthetic
  source 1..20: mol_type = other RNA
cagctcagctccacgtggtc

SEQ ID NO: 645 - RNA, 20 nt, synthetic construct
  misc_feature 1..20: note = Synthetic
  source 1..20: mol_type = other RNA
gacgatctgggtgacgggtt

SEQ ID NO: 646 - RNA, 20 nt, synthetic construct
  misc_feature 1..20: note = Synthetic
  source 1..20: mol_type = other RNA
tagcaggatctcatagagga

SEQ ID NO: 647 - RNA, 20 nt, synthetic construct
  misc_feature 1..20: note = Synthetic
  source 1..20: mol_type = other RNA
gaccagcacagcatacaggg

SEQ ID NO: 648 - RNA, 20 nt, synthetic construct
  misc_feature 1..20: note = Synthetic
  source 1..20: mol_type = other RNA
ctgaccacgtggagctgagc

SEQ ID NO: 649 - RNA, 20 nt, synthetic construct
  misc_feature 1..20: note = Synthetic
  source 1..20: mol_type = other RNA
ccaacagtgtcctaccagca

SEQ ID NO: 650 - RNA, 20 nt, synthetic construct
  misc_feature 1..20: note = Synthetic
  source 1..20: mol_type = other RNA
ctggtgggtgaatgggaagg

SEQ ID NO: 651 - RNA, 20 nt, synthetic construct
  misc_feature 1..20: note = Synthetic
  source 1..20: mol_type = other RNA
ctatgagatcctgctaggga

SEQ ID NO: 652 - RNA, 20 nt, synthetic construct
  misc_feature 1..20: note = Synthetic
  source 1..20: mol_type = other RNA
caggatctcatagaggatgg

SEQ ID NO: 653 - RNA, 20 nt, synthetic construct
  misc_feature 1..20: note = Synthetic
  source 1..20: mol_type = other RNA
ggccaccctgtatgctgtgc

SEQ ID NO: 654 - RNA, 20 nt, synthetic construct
  misc_feature 1..20: note = Synthetic
  source 1..20: mol_type = other RNA
caacagtgtcctaccagcaa

SEQ ID NO: 655 - RNA, 20 nt, synthetic construct
  misc_feature 1..20: note = Synthetic
  source 1..20: mol_type = other RNA
agctgagctggtgggtgaat

SEQ ID NO: 656 - RNA, 20 nt, synthetic construct
  misc_feature 1..20: note = Synthetic
  source 1..20: mol_type = other RNA
aacagtgtcctaccagcaag

SEQ ID NO: 657 - RNA, 20 nt, synthetic construct
  misc_feature 1..20: note = Synthetic
  source 1..20: mol_type = other RNA
aggcttcttccctgaccacg

SEQ ID NO: 658 - RNA, 20 nt, synthetic construct
  misc_feature 1..20: note = Synthetic
  source 1..20: mol_type = other RNA
tcttctgcaggtcaagagaa

SEQ ID NO: 659 - RNA, 20 nt, synthetic construct
  misc_feature 1..20: note = Synthetic
  source 1..20: mol_type = other RNA
gagctgagctggtgggtgaa

SEQ ID NO: 660 - RNA, 20 nt, synthetic construct
  misc_feature 1..20: note = Synthetic
  source 1..20: mol_type = other RNA
ggtcagcgcccttgtgttga

SEQ ID NO: 661 - RNA, 20 nt, synthetic construct
  misc_feature 1..20: note = Synthetic
  source 1..20: mol_type = other RNA
agatcgtcagcgccgaggcc

SEQ ID NO: 662 - RNA, 20 nt, synthetic construct
  misc_feature 1..20: note = Synthetic
  source 1..20: mol_type = other RNA
gctgctccttgaggggctgc

SEQ ID NO: 663 - RNA, 20 nt, synthetic construct
  misc_feature 1..20: note = Synthetic
  source 1..20: mol_type = other RNA
gtatctggagtcattgaggg

SEQ ID NO: 664 - RNA, 20 nt, synthetic construct
  misc_feature 1..20: note = Synthetic
  source 1..20: mol_type = other RNA
atcctctatgagatcctgct

SEQ ID NO: 665 - RNA, 20 nt, synthetic construct
  misc_feature 1..20: note = Synthetic
  source 1..20: mol_type = other RNA
tcctctatgagatcctgcta

SEQ ID NO: 666 - RNA, 20 nt, synthetic construct
  misc_feature 1..20: note = Synthetic
  source 1..20: mol_type = other RNA
gcagtatctggagtcattga

SEQ ID NO: 667 - RNA, 20 nt, synthetic construct
  misc_feature 1..20: note = Synthetic
  source 1..20: mol_type = other RNA
gctgaccagcacagcataca

SEQ ID NO: 668 - RNA, 20 nt, synthetic construct
  misc_feature 1..20: note = Synthetic
  source 1..20: mol_type = other RNA
acagggtggccttccctagc

SEQ ID NO: 669 - RNA, 20 nt, synthetic construct
  misc_feature 1..20: note = Synthetic
  source 1..20: mol_type = other RNA
cgctgaccagcacagcatac

SEQ ID NO: 670 - RNA, 20 nt, synthetic construct
  misc_feature 1..20: note = Synthetic
  source 1..20: mol_type = other RNA
agagatctcccacacccaaa

SEQ ID NO: 671 - RNA, 20 nt, synthetic construct
  misc_feature 1..20: note = Synthetic
  source 1..20: mol_type = other RNA
ggctctcggagaatgacgag

SEQ ID NO: 672 - RNA, 20 nt, synthetic construct
  misc_feature 1..20: note = Synthetic
  source 1..20: mol_type = other RNA
tgtggccaggcacaccagtg

SEQ ID NO: 673 - RNA, 20 nt, synthetic construct
  misc_feature 1..20: note = Synthetic
  source 1..20: mol_type = other RNA
gcggctgctcaggcagtatc

SEQ ID NO: 674 - RNA, 20 nt, synthetic construct
  misc_feature 1..20: note = Synthetic
  source 1..20: mol_type = other RNA
acactggtgtgcctggccac

SEQ ID NO: 675 - RNA, 20 nt, synthetic construct
  misc_feature 1..20: note = Synthetic
  source 1..20: mol_type = other RNA
cgtagaactggacttgacag

SEQ ID NO: 676 - RNA, 20 nt, synthetic construct
  misc_feature 1..20: note = Synthetic
  source 1..20: mol_type = other RNA
cttgacagcggaagtggttg

SEQ ID NO: 677 - RNA, 20 nt, synthetic construct
  misc_feature 1..20: note = Synthetic
  source 1..20: mol_type = other RNA
actggacttgacagcggaag

SEQ ID NO: 678 - RNA, 20 nt, synthetic construct
  misc_feature 1..20: note = Synthetic
  source 1..20: mol_type = other RNA
tgagggtctcggccaccttc

SEQ ID NO: 679 - RNA, 20 nt, synthetic construct
  misc_feature 1..20: note = Synthetic
  source 1..20: mol_type = other RNA
agtccagttctacgggctct

SEQ ID NO: 680 - RNA, 20 nt, synthetic construct
  misc_feature 1..20: note = Synthetic
  source 1..20: mol_type = other RNA
cacccagatcgtcagcgccg

SEQ ID NO: 681 - RNA, 20 nt, synthetic construct
  misc_feature 1..20: note = Synthetic
  source 1..20: mol_type = other RNA
gatcgtcagcgccgaggcct

SEQ ID NO: 682 - RNA, 20 nt, synthetic construct
  misc_feature 1..20: note = Synthetic
  source 1..20: mol_type = other RNA
atcgtcagcgccgaggcctg

SEQ ID NO: 683 - RNA, 20 nt, synthetic construct
  misc_feature 1..20: note = Synthetic
  source 1..20: mol_type = other RNA
actgcctgagcagccgcctg

SEQ ID NO: 684 - RNA, 20 nt, synthetic construct
  misc_feature 1..20: note = Synthetic
  source 1..20: mol_type = other RNA
gagcagccgcctgagggtct

SEQ ID NO: 685 - RNA, 20 nt, synthetic construct
  misc_feature 1..20: note = Synthetic
  source 1..20: mol_type = other RNA
agggcgggctgctccttgag

SEQ ID NO: 686 - RNA, 20 nt, synthetic construct
  misc_feature 1..20: note = Synthetic
  source 1..20: mol_type = other RNA
gctgtcaagtccagttctac

SEQ ID NO: 687 - RNA, 20 nt, synthetic construct
  misc_feature 1..20: note = Synthetic
  source 1..20: mol_type = other RNA
aggcctcggcgctgacgatc

SEQ ID NO: 688 - RNA, 20 nt, synthetic construct
  misc_feature 1..20: note = Synthetic
  source 1..20: mol_type = other RNA
ctgcctgagcagccgcctga

SEQ ID NO: 689 - RNA, 20 nt, synthetic construct
  misc_feature 1..20: note = Synthetic
  source 1..20: mol_type = other RNA
agaccctcaggcggctgctc

SEQ ID NO: 690 - RNA, 20 nt, synthetic construct
  misc_feature 1..20: note = Synthetic
  source 1..20: mol_type = other RNA
cgctgtcaagtccagttcta

SEQ ID NO: 691 - RNA, 20 nt, synthetic construct
  misc_feature 1..20: note = Synthetic
  source 1..20: mol_type = other RNA
aaaggccacactggtgtgcc

SEQ ID NO: 692 - RNA, 20 nt, synthetic construct
  misc_feature 1..20: note = Synthetic
  source 1..20: mol_type = other RNA
ttgacagcggaagtggttgc

SEQ ID NO: 693 - RNA, 20 nt, synthetic construct
  misc_feature 1..20: note = Synthetic
  source 1..20: mol_type = other RNA
ccactcacctgctctacccc

SEQ ID NO: 694 - RNA, 20 nt, synthetic construct
  misc_feature 1..20: note = Synthetic
  source 1..20: mol_type = other RNA
tggctcaaacacagcgacct

SEQ ID NO: 695 - RNA, 20 nt, synthetic construct
  misc_feature 1..20: note = Synthetic
  source 1..20: mol_type = other RNA
tggcagacaggaccccttgc

SEQ ID NO: 696 - RNA, 20 nt, synthetic construct
  misc_feature 1..20: note = Synthetic
  source 1..20: mol_type = other RNA
gttgcgggggttctgccaga

SEQ ID NO: 697 - RNA, 20 nt, synthetic construct
  misc_feature 1..20: note = Synthetic
  source 1..20: mol_type = other RNA
tgagggcgggctgctccttg

SEQ ID NO: 698 - RNA, 20 nt, synthetic construct
  misc_feature 1..20: note = Synthetic
  source 1..20: mol_type = other RNA
tctccgagagcccgtagaac

SEQ ID NO: 699 - RNA, 20 nt, synthetic construct
  misc_feature 1..20: note = Synthetic
  source 1..20: mol_type = other RNA
ggcctcggcgctgacgatct

SEQ ID NO: 700 - RNA, 20 nt, synthetic construct
  misc_feature 1..20: note = Synthetic
  source 1..20: mol_type = other RNA
atgacgagtggacccaggat

SEQ ID NO: 701 - RNA, 20 nt, synthetic construct
  misc_feature 1..20: note = Synthetic
  source 1..20: mol_type = other RNA
tgacgagtggacccaggata

SEQ ID NO: 702 - RNA, 20 nt, synthetic construct
  misc_feature 1..20: note = Synthetic
  source 1..20: mol_type = other RNA
gcgggggttctgccagaagg

SEQ ID NO: 703 - RNA, 20 nt, synthetic construct
  misc_feature 1..20: note = Synthetic
  source 1..20: mol_type = other RNA
ggtgcacagtggggtcagca

SEQ ID NO: 704 - RNA, 20 nt, synthetic construct
  misc_feature 1..20: note = Synthetic
  source 1..20: mol_type = other RNA
ggcgctgacgatctgggtga

SEQ ID NO: 705 - RNA, 20 nt, synthetic construct
  misc_feature 1..20: note = Synthetic
  source 1..20: mol_type = other RNA
agacaggaccccttgctggt

SEQ ID NO: 706 - RNA, 20 nt, synthetic construct
  misc_feature 1..20: note = Synthetic
  source 1..20: mol_type = other RNA
aacaaatgtgtcacaaagta

SEQ ID NO: 707 - RNA, 20 nt, synthetic construct
  misc_feature 1..20: note = Synthetic
  source 1..20: mol_type = other RNA
tttcaaaacctgtcagtgat

SEQ ID NO: 708 - RNA, 20 nt, synthetic construct
  misc_feature 1..20: note = Synthetic
  source 1..20: mol_type = other RNA
cttacctgggctggggaaga

SEQ ID NO: 709 - RNA, 20 nt, synthetic construct
  misc_feature 1..20: note = Synthetic
  source 1..20: mol_type = other RNA
ccgaatcctcctcctgaaag

SEQ ID NO: 710 - RNA, 20 nt, synthetic construct
  misc_feature 1..20: note = Synthetic
  source 1..20: mol_type = other RNA
ctgacaggttttgaaagttt

SEQ ID NO: 711 - RNA, 20 nt, synthetic construct
  misc_feature 1..20: note = Synthetic
  source 1..20: mol_type = other RNA
ctggggaagaaggtgtcttc

SEQ ID NO: 712 - RNA, 20 nt, synthetic construct
  misc_feature 1..20: note = Synthetic
  source 1..20: mol_type = other RNA
tcctcctcctgaaagtggcc

SEQ ID NO: 713 - RNA, 20 nt, synthetic construct
  misc_feature 1..20: note = Synthetic
  source 1..20: mol_type = other RNA
ccactttcaggaggaggatt

SEQ ID NO: 714 - RNA, 20 nt, synthetic construct
  misc_feature 1..20: note = Synthetic
  source 1..20: mol_type = other RNA
atttgtttgagaatcaaaat

SEQ ID NO: 715 - RNA, 20 nt, synthetic construct
  misc_feature 1..20: note = Synthetic
  source 1..20: mol_type = other RNA
cttcaagagcaacagtgctg

SEQ ID NO: 716 - RNA, 20 nt, synthetic construct
  misc_feature 1..20: note = Synthetic
  source 1..20: mol_type = other RNA
agctgcccttacctgggctg

SEQ ID NO: 717 - RNA, 20 nt, synthetic construct
  misc_feature 1..20: note = Synthetic
  source 1..20: mol_type = other RNA
agagcaacagtgctgtggcc

SEQ ID NO: 718 - RNA, 20 nt, synthetic construct
  misc_feature 1..20: note = Synthetic
  source 1..20: mol_type = other RNA
aaagctgcccttacctgggc

SEQ ID NO: 719 - RNA, 20 nt, synthetic construct
  misc_feature 1..20: note = Synthetic
  source 1..20: mol_type = other RNA
aagctgcccttacctgggct

SEQ ID NO: 720 - RNA, 20 nt, synthetic construct
  misc_feature 1..20: note = Synthetic
  source 1..20: mol_type = other RNA
tggaataatgctgttgttga

SEQ ID NO: 721 - RNA, 20 nt, synthetic construct
  misc_feature 1..20: note = Synthetic
  source 1..20: mol_type = other RNA
caccaaagctgcccttacct

SEQ ID NO: 722 - RNA, 20 nt, synthetic construct
  misc_feature 1..20: note = Synthetic
  source 1..20: mol_type = other RNA
agagtctctcagctggtaca

SEQ ID NO: 723 - RNA, 20 nt, synthetic construct
  misc_feature 1..20: note = Synthetic
  source 1..20: mol_type = other RNA
acacggcagggtcagggttc

SEQ ID NO: 724 - RNA, 20 nt, synthetic construct
  misc_feature 1..20: note = Synthetic
  source 1..20: mol_type = other RNA
agctggtacacggcagggtc

SEQ ID NO: 725 - RNA, 20 nt, synthetic construct
  misc_feature 1..20: note = Synthetic
  source 1..20: mol_type = other RNA
ctctcagctggtacacggca

SEQ ID NO: 726 - RNA, 20 nt, synthetic construct
  misc_feature 1..20: note = Synthetic
  source 1..20: mol_type = other RNA
tctctcagctggtacacggc

SEQ ID NO: 727 - RNA, 20 nt, synthetic construct
  misc_feature 1..20: note = Synthetic
  source 1..20: mol_type = other RNA
tggatttagagtctctcagc

SEQ ID NO: 728 - RNA, 20 nt, synthetic construct
  misc_feature 1..20: note = Synthetic
  source 1..20: mol_type = other RNA
taggcagacagacttgtcac

SEQ ID NO: 729 - RNA, 20 nt, synthetic construct
  misc_feature 1..20: note = Synthetic
  source 1..20: mol_type = other RNA
ttcggaacccaatcactgac

SEQ ID NO: 730 - RNA, 20 nt, synthetic construct
  misc_feature 1..20: note = Synthetic
  source 1..20: mol_type = other RNA
gctggtacacggcagggtca

SEQ ID NO: 731 - RNA, 20 nt, synthetic construct
  misc_feature 1..20: note = Synthetic
  source 1..20: mol_type = other RNA
acaaaactgtgctagacatg

SEQ ID NO: 732 - RNA, 20 nt, synthetic construct
  misc_feature 1..20: note = Synthetic
  source 1..20: mol_type = other RNA
gagaatcaaaatcggtgaat

SEQ ID NO: 733 - RNA, 20 nt, synthetic construct
  misc_feature 1..20: note = Synthetic
  source 1..20: mol_type = other RNA
aagttcctgtgatgtcaagc

SEQ ID NO: 734 - RNA, 20 nt, synthetic construct
  misc_feature 1..20: note = Synthetic
  source 1..20: mol_type = other RNA
tgctcatgacgctgcggctg

SEQ ID NO: 735 - RNA, 20 nt, synthetic construct
  misc_feature 1..20: note = Synthetic
  source 1..20: mol_type = other RNA
ttaatctgctcatgacgctg

SEQ ID NO: 736 - RNA, 20 nt, synthetic construct
  misc_feature 1..20: note = Synthetic
  source 1..20: mol_type = other RNA
gattaaacccggccactttc

SEQ ID NO: 737 - RNA, 20 nt, synthetic construct
  misc_feature 1..20: note = Synthetic
  source 1..20: mol_type = other RNA
ctcgaccagcttgacatcac

SEQ ID NO: 738 - RNA, 20 nt, synthetic construct
  misc_feature 1..20: note = Synthetic
  source 1..20: mol_type = other RNA
taaacccggccactttcagg

SEQ ID NO: 739 - RNA, 20 nt, synthetic construct
  misc_feature 1..20: note = Synthetic
  source 1..20: mol_type = other RNA
acccggccactttcaggagg

SEQ ID NO: 740 - RNA, 20 nt, synthetic construct
  misc_feature 1..20: note = Synthetic
  source 1..20: mol_type = other RNA
aaagtcagatttgttgctcc

SEQ ID NO: 741 - RNA, 20 nt, synthetic construct
  misc_feature 1..20: note = Synthetic
  source 1..20: mol_type = other RNA
gcaccaaagctgcccttacc

SEQ ID NO: 742 - RNA, 20 nt, synthetic construct
  misc_feature 1..20: note = Synthetic
  source 1..20: mol_type = other RNA
atcctcctcctgaaagtggc

SEQ ID NO: 743 - RNA, 20 nt, synthetic construct
  misc_feature 1..20: note = Synthetic
  source 1..20: mol_type = other RNA
ttcaaaacctgtcagtgatt

SEQ ID NO: 744 - RNA, 20 nt, synthetic construct
  misc_feature 1..20: note = Synthetic
  source 1..20: mol_type = other RNA
tgtgctagacatgaggtcta

SEQ ID NO: 745 - RNA, 20 nt, synthetic construct
  misc_feature 1..20: note = Synthetic
  source 1..20: mol_type = other RNA
cgtcatgagcagattaaacc

SEQ ID NO: 746 - RNA, 20 nt, synthetic construct
  misc_feature 1..20: note = Synthetic
  source 1..20: mol_type = other RNA
tcaaggcccctcacctcagc

SEQ ID NO: 747 - RNA, 100 nt, synthetic construct
  misc_feature 1..100: note = Synthetic
  source 1..100: mol_type = other RNA
aacaaatgtgtcacaaagtagttttagagctagaaatagcaagttaaaataaggctagtccgttatcaacttgaaaaagtggcaccgagtcggtgctttt

SEQ ID NO: 748 - RNA, 100 nt, synthetic construct; identical to SEQ ID NO: 178
  misc_feature 1..100: note = Synthetic
  source 1..100: mol_type = other RNA

SEQ ID NO: 749 - RNA, 100 nt, synthetic construct
  misc_feature 1..100: note = Synthetic
  source 1..100: mol_type = other RNA
cttacctgggctggggaagagttttagagctagaaatagcaagttaaaataaggctagtccgttatcaacttgaaaaagtggcaccgagtcggtgctttt

SEQ ID NO: 750 - RNA, 100 nt, synthetic construct
  misc_feature 1..100: note = Synthetic
  source 1..100: mol_type = other RNA
ccgaatcctcctcctgaaaggttttagagctagaaatagcaagttaaaataaggctagtccgttatcaacttgaaaaagtggcaccgagtcggtgctttt

SEQ ID NO: 751 - RNA, 100 nt, synthetic construct
  misc_feature 1..100: note = Synthetic
  source 1..100: mol_type = other RNA
ctgacaggttttgaaagtttgttttagagctagaaatagcaagttaaaataaggctagtccgttatcaacttgaaaaagtggcaccgagtcggtgctttt

SEQ ID NO: 752 - RNA, 100 nt, synthetic construct
  misc_feature 1..100: note = Synthetic
  source 1..100: mol_type = other RNA
ctggggaagaaggtgtcttcgttttagagctagaaatagcaagttaaaataaggctagtccgttatcaacttgaaaaagtggcaccgagtcggtgctttt

SEQ ID NO: 753 - RNA, 100 nt, synthetic construct
  misc_feature 1..100: note = Synthetic
  source 1..100: mol_type = other RNA
tcctcctcctgaaagtggccgttttagagctagaaatagcaagttaaaataaggctagtccgttatcaacttgaaaaagtggcaccgagtcggtgctttt

SEQ ID NO: 754 - RNA, 100 nt, synthetic construct
  misc_feature 1..100: note = Synthetic
  source 1..100: mol_type = other RNA
ccactttcaggaggaggattgttttagagctagaaatagcaagttaaaataaggctagtccgttatcaacttgaaaaagtggcaccgagtcggtgctttt

SEQ ID NO: 755 - RNA, 100 nt, synthetic construct
  misc_feature 1..100: note = Synthetic
  source 1..100: mol_type = other RNA
atttgtttgagaatcaaaatgttttagagctagaaatagcaagttaaaataaggctagtccgttatcaacttgaaaaagtggcaccgagtcggtgctttt

SEQ ID NO: 756 - RNA, 100 nt, synthetic construct
  misc_feature 1..100: note = Synthetic
  source 1..100: mol_type = other RNA
cttcaagagcaacagtgctggttttagagctagaaatagcaagttaaaataaggctagtccgttatcaacttgaaaaagtggcaccgagtcggtgctttt

SEQ ID NO: 757 - RNA, 100 nt, synthetic construct
  misc_feature 1..100: note = Synthetic
  source 1..100: mol_type = other RNA
agctgcccttacctgggctggttttagagctagaaatagcaagttaaaataaggctagtccgttatcaacttgaaaaagtggcaccgagtcggtgctttt

SEQ ID NO: 758 - RNA, 100 nt, synthetic construct
  misc_feature 1..100: note = Synthetic
  source 1..100: mol_type = other RNA
agagcaacagtgctgtggccgttttagagctagaaatagcaagttaaaataaggctagtccgttatcaacttgaaaaagtggcaccgagtcggtgctttt

SEQ ID NO: 759 - RNA, 100 nt, synthetic construct
  misc_feature 1..100: note = Synthetic
  source 1..100: mol_type = other RNA
aaagctgcccttacctgggcgttttagagctagaaatagcaagttaaaataaggctagtccgttatcaacttgaaaaagtggcaccgagtcggtgctttt

SEQ ID NO: 760 - RNA, 100 nt, synthetic construct
  misc_feature 1..100: note = Synthetic
  source 1..100: mol_type = other RNA
aagctgcccttacctgggctgttttagagctagaaatagcaagttaaaataaggctagtccgttatcaacttgaaaaagtggcaccgagtcggtgctttt

SEQ ID NO: 761 - RNA, 100 nt, synthetic construct
  misc_feature 1..100: note = Synthetic
  source 1..100: mol_type = other RNA
tggaataatgctgttgttgagttttagagctagaaatagcaagttaaaataaggctagtccgttatcaacttgaaaaagtggcaccgagtcggtgctttt

SEQ ID NO: 762 - RNA, 100 nt, synthetic construct
  misc_feature 1..100: note = Synthetic
  source 1..100: mol_type = other RNA
caccaaagctgcccttacctgttttagagctagaaatagcaagttaaaataaggctagtccgttatcaacttgaaaaagtggcaccgagtcggtgctttt

SEQ ID NO: 763-800 - skipped (38 entries)

SEQ ID NO: 801 - RNA, 100 nt, synthetic construct
  misc_feature 1..100: note = Synthetic
  modified_base 1..100: mod_base = OTHER; note = 2'-O-Me and PS modification may or may not be present for detailed description of substitutions and preferred
  source 1..100: mol_type = other RNA
ccacacccaaaaggccacacgttttagagctagaaatagcaagttaaaataaggctagtccgttatcaacttgaaaaagtggcaccgagtcggtgctttt

SEQ ID NO: 802 - RNA, 100 nt, synthetic construct
  misc_feature 1..100: note = Synthetic
  modified_base 1..100: mod_base = OTHER; note = 2'-O-Me and PS modification may or may not be present
  source 1..100: mol_type = other RNA
cccaccagctcagctccacggttttagagctagaaatagcaagttaaaataaggctagtccgttatcaacttgaaaaagtggcaccgagtcggtgctttt

SEQ ID NO: 803 - RNA, 100 nt, synthetic construct
  misc_feature 1..100: note = Synthetic
  modified_base 1..100: mod_base = OTHER; note = 2'-O-Me and PS modification may or may not be present
  source 1..100: mol_type = other RNA
tccctagcaggatctcataggttttagagctagaaatagcaagttaaaataaggctagtccgttatcaacttgaaaaagtggcaccgagtcggtgctttt

SEQ ID NO: 804 - RNA, 100 nt, synthetic construct
  misc_feature 1..100: note = Synthetic
  modified_base 1..100: mod_base = OTHER; note = 2'-O-Me and PS modification may or may not be present
  source 1..100: mol_type = other RNA
ggctcaaacacagcgacctcgttttagagctagaaatagcaagttaaaataaggctagtccgttatcaacttgaaaaagtggcaccgagtcggtgctttt

SEQ ID NO: 805 - RNA, 100 nt, synthetic construct
  misc_feature 1..100: note = Synthetic
  modified_base 1..100: mod_base = OTHER; note = 2'-O-Me and PS modification may or may not be present
  source 1..100: mol_type = other RNA
ggcacaccagtgtggcctttgttttagagctagaaatagcaagttaaaataaggctagtccgttatcaacttgaaaaagtggcaccgagtcggtgctttt

SEQ ID NO: 806 - RNA, 100 nt, synthetic construct
  misc_feature 1..100: note = Synthetic
  modified_base 1..100: mod_base = OTHER; note = 2'-O-Me and PS modification may or may not be present
  source 1..100: mol_type = other RNA
aggtggccgagaccctcagggttttagagctagaaatagcaagttaaaataaggctagtccgttatcaacttgaaaaagtggcaccgagtcggtgctttt

SEQ ID NO: 807 - RNA, 100 nt, synthetic construct
  misc_feature 1..100: note = Synthetic
  modified_base 1..100: mod_base = OTHER; note = 2'-O-Me and PS modification may or may not be present
  source 1..100: mol_type = other RNA
acctgctctaccccaggcctgttttagagctagaaatagcaagttaaaataaggctagtccgttatcaacttgaaaaagtggcaccgagtcggtgctttt

SEQ ID NO: 808 - RNA, 100 nt, synthetic construct
  misc_feature 1..100: note = Synthetic
  modified_base 1..100: mod_base = OTHER; note = 2'-O-Me and PS modification may or may not be present
  source 1..100: mol_type = other RNA
catagaggatggtggcagacgttttagagctagaaatagcaagttaaaataaggctagtccgttatcaacttgaaaaagtggcaccgagtcggtgctttt

SEQ ID NO: 809 - RNA, 100 nt, synthetic construct
  misc_feature 1..100: note = Synthetic
  modified_base 1..100: mod_base = OTHER; note = 2'-O-Me and PS modification may or may not be present
  source 1..100: mol_type = other RNA
ccacgtggagctgagctggtgttttagagctagaaatagcaagttaaaataaggctagtccgttatcaacttgaaaaagtggcaccgagtcggtgctttt

SEQ ID NO: 810 - RNA, 100 nt, synthetic construct
  misc_feature 1..100: note = Synthetic
  modified_base 1..100: mod_base = OTHER; note = 2'-O-Me and PS modification may or may not be present
  source 1..100: mol_type = other RNA
ggagaatgacgagtggacccgttttagagctagaaatagcaagttaaaataaggctagtccgttatcaacttgaaaaagtggcaccgagtcggtgctttt

SEQ ID NO: 811 - RNA, 100 nt, synthetic construct
  misc_feature 1..100: note = Synthetic
  modified_base 1..100: mod_base = OTHER; note = 2'-O-Me and PS modification may or may not be present
  source 1..100: mol_type = other RNA
ccagtgtggccttttgggtggttttagagctagaaatagcaagttaaaataaggctagtccgttatcaacttgaaaaagtggcaccgagtcggtgctttt

SEQ ID NO: 812 - RNA, 100 nt, synthetic construct
  misc_feature 1..100: note = Synthetic
  modified_base 1..100: mod_base = OTHER; note = 2'-O-Me and PS modification may or may not be present
  source 1..100: mol_type = other RNA
caaacacagcgacctcgggtgttttagagctagaaatagcaagttaaaataaggctagtccgttatcaacttgaaaaagtggcaccgagtcggtgctttt

SEQ ID NO: 813 - RNA, 100 nt, synthetic construct
  misc_feature 1..100: note = Synthetic
  modified_base 1..100: mod_base = OTHER; note = 2'-O-Me and PS modification may or may not be present
  source 1..100: mol_type = other RNA
taccatggccatcaacacaagttttagagctagaaatagcaagttaaaataaggctagtccgttatcaacttgaaaaagtggcaccgagtcggtgctttt

SEQ ID NO: 814 - RNA, 100 nt, synthetic construct
  misc_feature 1..100: note = Synthetic
  modified_base 1..100: mod_base = OTHER; note = 2'-O-Me and PS modification may or may not be present
  source 1..100: mol_type = other RNA
gcgctgacgatctgggtgacgttttagagctagaaatagcaagttaaaataaggctagtccgttatcaacttgaaaaagtggcaccgagtcggtgctttt

SEQ ID NO: 815 - RNA, 100 nt, synthetic construct
  misc_feature 1..100: note = Synthetic
  modified_base 1..100: mod_base = OTHER; note = 2'-O-Me and PS modification may or may not be present
  source 1..100: mol_type = other RNA
cacggacccgcagcccctcagttttagagctagaaatagcaagttaaaataaggctagtccgttatcaacttgaaaaagtggcaccgagtcggtgctttt

SEQ ID NO: 816 - RNA, 100 nt, synthetic construct
  misc_feature 1..100: note = Synthetic
  modified_base 1..100: mod_base = OTHER; note = 2'-O-Me and PS modification may or may not be present
  source 1..100: mol_type = other RNA
tcaaacacagcgacctcggggttttagagctagaaatagcaagttaaaataaggctagtccgttatcaacttgaaaaagtggcaccgagtcggtgctttt

SEQ ID NO: 817 - RNA, 100 nt, synthetic construct
  misc_feature 1..100: note = Synthetic
  modified_base 1..100: mod_base = OTHER; note = 2'-O-Me and PS modification may or may not be present
  source 1..100: mol_type = other RNA
cagggaagaagcctgtggccgttttagagctagaaatagcaagttaaaataaggctagtccgttatcaacttgaaaaagtggcaccgagtcggtgctttt

SEQ ID NO: 818 - RNA, 100 nt, synthetic construct
  misc_feature 1..100: note = Synthetic
  modified_base 1..100: mod_base = OTHER; note = 2'-O-Me and PS modification may or may not be present
  source 1..100: mol_type = other RNA
cagtgtggccttttgggtgtgttttagagctagaaatagcaagttaaaataaggctagtccgttatcaacttgaaaaagtggcaccgagtcggtgctttt

SEQ ID NO: 819 - RNA, 100 nt, synthetic construct
  misc_feature 1..100: note = Synthetic
  modified_base 1..100: mod_base = OTHER; note = 2'-O-Me and PS modification may or may not be present embodiments
  source 1..100: mol_type = other RNA
accacgtggagctgagctgggttttagagctagaaatagcaagttaaaataaggctagtccgttatcaacttgaaaaagtggcaccgagtcggtgctttt

SEQ ID NO: 820 - RNA, 100 nt, synthetic construct
  misc_feature 1..100: note = Synthetic
  modified_base 1..100: mod_base = OTHER; note = 2'-O-Me and PS modification may or may not be present
  source 1..100: mol_type = other RNA
gagggcgggctgctccttgagttttagagctagaaatagcaagttaaaataaggctagtccgttatcaacttgaaaaagtggcaccgagtcggtgctttt

SEQ ID NO: 821 - RNA, 100 nt, synthetic construct
  misc_feature 1..100: note = Synthetic
  modified_base 1..100: mod_base = OTHER; note = 2'-O-Me and PS modification may or may not be present
  source 1..100: mol_type = other RNA
agctcagctccacgtggtcagttttagagctagaaatagcaagttaaaataaggctagtccgttatcaacttgaaaaagtggcaccgagtcggtgctttt

SEQ ID NO: 822 - RNA, 100 nt, synthetic construct
  misc_feature 1..100: note = Synthetic
  modified_base 1..100: mod_base = OTHER; note = 2'-O-Me and PS modification may or may not be present
  source 1..100: mol_type = other RNA
gaacaaggtgttcccacccggttttagagctagaaatagcaagttaaaataaggctagtccgttatcaacttgaaaaagtggcaccgagtcggtgctttt

SEQ ID NO: 823 - RNA, 100 nt, synthetic construct
  misc_feature 1..100: note = Synthetic
  modified_base 1..100: mod_base = OTHER; note = 2'-O-Me and PS modification may or may not be present
  source 1..100: mol_type = other RNA
gcacaccagtgtggccttttgttttagagctagaaatagcaagttaaaataaggctagtccgttatcaacttgaaaaagtggcaccgagtcggtgctttt

SEQ ID NO: 824 - RNA, 100 nt, synthetic construct
  misc_feature 1..100: note = Synthetic
  modified_base 1..100: mod_base = OTHER; note = 2'-O-Me and PS modification may or may not be present
  source 1..100: mol_type = other RNA
gagctggtgggtgaatgggagttttagagctagaaatagcaagttaaaataaggctagtccgttatcaacttgaaaaagtggcaccgagtcggtgctttt

SEQ ID NO: 825 - RNA, 100 nt, synthetic construct
  misc_feature 1..100: note = Synthetic
  modified_base 1..100: mod_base = OTHER; note = 2'-O-Me and PS modification may or may not be present
  source 1..100: mol_type = other RNA
ggctgctccttgaggggctggttttagagctagaaatagcaagttaaaataaggctagtccgttatcaacttgaaaaagtggcaccgagtcggtgctttt

SEQ ID NO: 826 - RNA, 100 nt, synthetic construct
  misc_feature 1..100: note = Synthetic
  modified_base 1..100: mod_base = OTHER; note = 2'-O-Me and PS modification may or may not be present
  source 1..100: mol_type = other RNA
cgggtgggaacaccttgttcgttttagagctagaaatagcaagttaaaataaggctagtccgttatcaacttgaaaaagtggcaccgagtcggtgctttt

SEQ ID NO: 827 - RNA, 100 nt, synthetic construct
  misc_feature 1..100: note = Synthetic
  modified_base 1..100: mod_base = OTHER; note = 2'-O-Me and PS modification may or may not be present
  source 1..100: mol_type = other RNA
cagctcagctccacgtggtcgttttagagctagaaatagcaagttaaaataaggctagtccgttatcaacttgaaaaagtggcaccgagtcggtgctttt

SEQ ID NO: 828 - RNA, 100 nt, synthetic construct
  misc_feature 1..100: note = Synthetic
  modified_base 1..100: mod_base = OTHER; note = 2'-O-Me and PS modification may or may not be present
  source 1..100: mol_type = other RNA
gacgatctgggtgacgggttgttttagagctagaaatagcaagttaaaataaggctagtccgttatcaacttgaaaaagtggcaccgagtcggtgctttt

SEQ ID NO: 829 - RNA, 100 nt, synthetic construct
  misc_feature 1..100: note = Synthetic
  modified_base 1..100: mod_base = OTHER; note = 2'-O-Me and PS modification may or may not be present
  source 1..100: mol_type = other RNA
tagcaggatctcatagaggagttttagagctagaaatagcaagttaaaataaggctagtccgttatcaacttgaaaaagtggcaccgagtcggtgctttt

SEQ ID NO: 830 - RNA, 100 nt, synthetic construct
  misc_feature 1..100: note = Synthetic
  modified_base 1..100: mod_base = OTHER; note = 2'-O-Me and PS modification may or may not be present
  source 1..100: mol_type = other RNA
gaccagcacagcatacaggggttttagagctagaaatagcaagttaaaataaggctagtccgttatcaacttgaaaaagtggcaccgagtcggtgctttt

SEQ ID NO: 831 - RNA, 100 nt, synthetic construct
  misc_feature 1..100: note = Synthetic
  modified_base 1..100: mod_base = OTHER; note = 2'-O-Me and PS modification may or may not be present
  source 1..100: mol_type = other RNA
ctgaccacgtggagctgagcgttttagagctagaaatagcaagttaaaataaggctagtccgttatcaacttgaaaaagtggcaccgagtcggtgctttt

SEQ ID NO: 832 - RNA, 100 nt, synthetic construct
  misc_feature 1..100: note = Synthetic
  modified_base 1..100: mod_base = OTHER; note = 2'-O-Me and PS modification may or may not be present
  source 1..100: mol_type = other RNA
ccaacagtgtcctaccagcagttttagagctagaaatagcaagttaaaataaggctagtccgttatcaacttgaaaaagtggcaccgagtcggtgctttt

SEQ ID NO: 833 - RNA, 100 nt, synthetic construct
  misc_feature 1..100: note = Synthetic
  modified_base 1..100: mod_base = OTHER; note = 2'-O-Me and PS modification may or may not be present
  source 1..100: mol_type = other RNA
ctggtgggtgaatgggaagggttttagagctagaaatagcaagttaaaataaggctagtccgttatcaacttgaaaaagtggcaccgagtcggtgctttt

SEQ ID NO: 834 - RNA, 100 nt, synthetic construct
  misc_feature 1..100: note = Synthetic
  modified_base 1..100: mod_base = OTHER; note = 2'-O-Me and PS modification may or may not be present
  source 1..100: mol_type = other RNA
ctatgagatcctgctagggagttttagagctagaaatagcaagttaaaataaggctagtccgttatcaacttgaaaaagtggcaccgagtcggtgctttt

SEQ ID NO: 835 - RNA, 100 nt, synthetic construct
  misc_feature 1..100: note = Synthetic
  modified_base 1..100: mod_base = OTHER; note = 2'-O-Me and PS modification may or may not be present
  source 1..100: mol_type = other RNA
caggatctcatagaggatgggttttagagctagaaatagcaagttaaaataaggctagtccgttatcaacttgaaaaagtggcaccgagtcggtgctttt

SEQ ID NO: 836 - RNA, 100 nt, synthetic construct
  misc_feature 1..100: note = Synthetic
  modified_base 1..100: mod_base = OTHER; note = 2'-O-Me and PS modification may or may not be present
  source 1..100: mol_type = other RNA
ggccaccctgtatgctgtgcgttttagagctagaaatagcaagttaaaataaggctagtccgttatcaacttgaaaaagtggcaccgagtcggtgctttt

SEQ ID NO: 837 - RNA, 100 nt, synthetic construct
  misc_feature 1..100: note = Synthetic
  modified_base 1..100: mod_base = OTHER; note = 2'-O-Me and PS modification may or may not be present
  source 1..100: mol_type = other RNA
caacagtgtcctaccagcaagttttagagctagaaatagcaagttaaaataaggctagtccgttatcaacttgaaaaagtggcaccgagtcggtgctttt

SEQ ID NO: 838 - RNA, 100 nt, synthetic construct
  misc_feature 1..100: note = Synthetic
  modified_base 1..100: mod_base = OTHER; note = 2'-O-Me and PS modification may or may not be present
  source 1..100: mol_type = other RNA
agctgagctggtgggtgaatgttttagagctagaaatagcaagttaaaataaggctagtccgttatcaacttgaaaaagtggcaccgagtcggtgctttt

SEQ ID NO: 839 - RNA, 100 nt, synthetic construct
  misc_feature 1..100: note = Synthetic
  modified_base 1..100: mod_base = OTHER; note = 2'-O-Me and PS modification may or may not be present
  source 1..100: mol_type = other RNA
aacagtgtcctaccagcaaggttttagagctagaaatagcaagttaaaataaggctagtccgttatcaacttgaaaaagtggcaccgagtcggtgctttt

SEQ ID NO: 840 - RNA, 100 nt, synthetic construct
  misc_feature 1..100: note = Synthetic
  modified_base 1..100: mod_base = OTHER; note = 2'-O-Me and PS modification may or may not be present
  source 1..100: mol_type = other RNA
aggcttcttccctgaccacggttttagagctagaaatagcaagttaaaataaggctagtccgttatcaacttgaaaaagtggcaccgagtcggtgctttt

SEQ ID NO: 841 - RNA, 100 nt, synthetic construct
  misc_feature 1..100: note = Synthetic
  modified_base 1..100: mod_base = OTHER; note = 2'-O-Me and PS modification may or may not be present
  source 1..100: mol_type = other RNA
tcttctgcaggtcaagagaagttttagagctagaaatagcaagttaaaataaggctagtccgttatcaacttgaaaaagtggcaccgagtcggtgctttt

SEQ ID NO: 842 - RNA, 100 nt, synthetic construct
  misc_feature 1..100: note = Synthetic
  modified_base 1..100: mod_base = OTHER; note = 2'-O-Me and PS modification may or may not be present
  source 1..100: mol_type = other RNA
gagctgagctggtgggtgaagttttagagctagaaatagcaagttaaaataaggctagtccgttatcaacttgaaaaagtggcaccgagtcggtgctttt

SEQ ID NO: 843 - RNA, 100 nt, synthetic construct
  misc_feature 1..100: note = Synthetic
  modified_base 1..100: mod_base = OTHER; note = 2'-O-Me and PS modification may or may not be present
  source 1..100: mol_type = other RNA
ggtcagcgcccttgtgttgagttttagagctagaaatagcaagttaaaataaggctagtccgttatcaacttgaaaaagtggcaccgagtcggtgctttt

SEQ ID NO: 844 - RNA, 100 nt, synthetic construct
  misc_feature 1..100: note = Synthetic
  modified_base 1..100: mod_base = OTHER; note = 2'-O-Me and PS modification may or may not be present
  source 1..100: mol_type = other RNA
agatcgtcagcgccgaggccgttttagagctagaaatagcaagttaaaataaggctagtccgttatcaacttgaaaaagtggcaccgagtcggtgctttt

SEQ ID NO: 845 - RNA, 100 nt, synthetic construct
  misc_feature 1..100: note = Synthetic
  modified_base 1..100: mod_base = OTHER; note = 2'-O-Me and PS modification may or may not be present
  source 1..100: mol_type = other RNA
gctgctccttgaggggctgcgttttagagctagaaatagcaagttaaaataaggctagtccgttatcaacttgaaaaagtggcaccgagtcggtgctttt

SEQ ID NO: 846 - RNA, 100 nt, synthetic construct
  misc_feature 1..100: note = Synthetic
  modified_base 1..100: mod_base = OTHER; note = 2'-O-Me and PS modification may or may not be present
  source 1..100: mol_type = other RNA
gtatctggagtcattgaggggttttagagctagaaatagcaagttaaaataaggctagtccgttatcaacttgaaaaagtggcaccgagtcggtgctttt

SEQ ID NO: 847 - RNA, 100 nt, synthetic construct
  misc_feature 1..100: note = Synthetic
  modified_base 1..100: mod_base = OTHER; note = 2'-O-Me and PS modification may or may not be present
  source 1..100: mol_type = other RNA
atcctctatgagatcctgctgttttagagctagaaatagcaagttaaaataaggctagtccgttatcaacttgaaaaagtggcaccgagtcggtgctttt

SEQ ID NO: 848 - RNA, 100 nt, synthetic construct
  misc_feature 1..100: note = Synthetic
  modified_base 1..100: mod_base = OTHER; note = 2'-O-Me and PS modification may or may not be present
  source 1..100: mol_type = other RNA
tcctctatgagatcctgctagttttagagctagaaatagcaagttaaaataaggctagtccgttatcaacttgaaaaagtggcaccgagtcggtgctttt

SEQ ID NO: 849 - RNA, 100 nt, synthetic construct
  misc_feature 1..100: note = Synthetic
  modified_base 1..100: mod_base = OTHER; note = 2'-O-Me and PS modification may or may not be present
  source 1..100: mol_type = other RNA
gcagtatctggagtcattgagttttagagctagaaatagcaagttaaaataaggctagtccgttatcaacttgaaaaagtggcaccgagtcggtgctttt

SEQ ID NO: 850 - RNA, 100 nt, synthetic construct
  misc_feature 1..100: note = Synthetic
  modified_base 1..100: mod_base = OTHER; note = 2'-O-Me and PS modification may or may not be present
  source 1..100: mol_type = other RNA
gctgaccagcacagcatacagttttagagctagaaatagcaagttaaaataaggctagtccgttatcaacttgaaaaagtggcaccgagtcggtgctttt

SEQ ID NO: 851 - RNA, 100 nt, synthetic construct
  misc_feature 1..100: note = Synthetic
  modified_base 1..100: mod_base = OTHER; note = 2'-O-Me and PS modification may or may not be present
  source 1..100: mol_type = other RNA
acagggtggccttccctagcgttttagagctagaaatagcaagttaaaataaggctagtccgttatcaacttgaaaaagtggcaccgagtcggtgctttt

SEQ ID NO: 852 - RNA, 100 nt, synthetic construct
  misc_feature 1..100: note = Synthetic
  modified_base 1..100: mod_base = OTHER; note = 2'-O-Me and PS modification may or may not be present
  source 1..100: mol_type = other RNA
cgctgaccagcacagcatacgttttagagctagaaatagcaagttaaaataaggctagtccgttatcaacttgaaaaagtggcaccgagtcggtgctttt

SEQ ID NO: 853 - RNA, 100 nt, synthetic construct; identical to SEQ ID NO: 747
  misc_feature 1..100: note = Synthetic
  modified_base 1..100: mod_base = OTHER; note = 2'-O-Me and PS modification may or may not be present
  source 1..100: mol_type = other RNA

SEQ ID NO: 854 - RNA, 100 nt, synthetic construct; identical to SEQ ID NO: 178
  misc_feature 1..100: note = Synthetic
  modified_base 1..100: mod_base = OTHER; note = 2'-O-Me and PS modification may or may not be present
  source 1..100: mol_type = other RNA

SEQ ID NO: 855 - RNA, 100 nt, synthetic construct; identical to SEQ ID NO: 749
  misc_feature 1..100: note = Synthetic
  modified_base 1..100: mod_base = OTHER; note = 2'-O-Me and PS modification may or may not be present
  source 1..100: mol_type = other RNA

SEQ ID NO: 856 - RNA, 100 nt, synthetic construct; identical to SEQ ID NO: 750
  misc_feature 1..100: note = Synthetic
  modified_base 1..100: mod_base = OTHER; note = 2'-O-Me and PS modification may or may not be present
  source 1..100: mol_type = other RNA

SEQ ID NO: 857 - RNA, 100 nt, synthetic construct; identical to SEQ ID NO: 751
  misc_feature 1..100: note = Synthetic
  modified_base 1..100: mod_base = OTHER; note = 2'-O-Me and PS modification may or may not be present
  source 1..100: mol_type = other RNA

SEQ ID NO: 858 - RNA, 100 nt, synthetic construct; identical to SEQ ID NO: 752
  misc_feature 1..100: note = Synthetic
  modified_base 1..100: mod_base = OTHER; note = 2'-O-Me and PS modification may or may not be present
  source 1..100: mol_type = other RNA

SEQ ID NO: 859 - RNA, 100 nt, synthetic construct; identical to SEQ ID NO: 753
  misc_feature 1..100: note = Synthetic
  modified_base 1..100: mod_base = OTHER; note = 2'-O-Me and PS modification may or may not be present
  source 1..100: mol_type = other RNA

SEQ ID NO: 860 - RNA, 100 nt, synthetic construct; identical to SEQ ID NO: 754
  misc_feature 1..100: note = Synthetic
  modified_base 1..100: mod_base = OTHER; note = 2'-O-Me and PS modification may or may not be present
  source 1..100: mol_type = other RNA

SEQ ID NO: 861 - RNA, 100 nt, synthetic construct; identical to SEQ ID NO: 755
  misc_feature 1..100: note = Synthetic
  modified_base 1..100: mod_base = OTHER; note = 2'-O-Me and PS modification may or may not be present
  source 1..100: mol_type = other RNA

SEQ ID NO: 862 - RNA, 100 nt, synthetic construct; identical to SEQ ID NO: 756
  misc_feature 1..100: note = Synthetic
  modified_base 1..100: mod_base = OTHER; note = 2'-O-Me and PS modification may or may not be present
  source 1..100: mol_type = other RNA

SEQ ID NO: 863 - RNA, 100 nt, synthetic construct; identical to SEQ ID NO: 757
  misc_feature 1..100: note = Synthetic
  modified_base 1..100: mod_base = OTHER; note = 2'-O-Me and PS modification may or may not be present
  source 1..100: mol_type = other RNA

SEQ ID NO: 864 - RNA, 100 nt, synthetic construct; identical to SEQ ID NO: 758
  misc_feature 1..100: note = Synthetic
  modified_base 1..100: mod_base = OTHER; note = 2'-O-Me and PS modification may or may not be present
  source 1..100: mol_type = other RNA

SEQ ID NO: 865 - RNA, 100 nt, synthetic construct; identical to SEQ ID NO: 759
  misc_feature 1..100: note = Synthetic
  modified_base 1..100: mod_base = OTHER; note = 2'-O-Me and PS modification may or may not be present
  source 1..100: mol_type = other RNA

SEQ ID NO: 866 - RNA, 100 nt, synthetic construct; identical to SEQ ID NO: 760
  misc_feature 1..100: note = Synthetic
  modified_base 1..100: mod_base = OTHER; note = 2'-O-Me and PS modification may or may not be present
  source 1..100: mol_type = other RNA

SEQ ID NO: 867 - RNA, 100 nt, synthetic construct; identical to SEQ ID NO: 761
  misc_feature 1..100: note = Synthetic
  modified_base 1..100: mod_base = OTHER; note = 2'-O-Me and PS modification may or may not be present
  source 1..100: mol_type = other RNA

SEQ ID NO: 868 - RNA, 100 nt, synthetic construct; identical to SEQ ID NO: 762
  misc_feature 1..100: note = Synthetic
  modified_base 1..100: mod_base = OTHER; note = 2'-O-Me and PS modification may or may not be present
  source 1..100: mol_type = other RNA

SEQ ID NO: 869 - RNA, 100 nt, synthetic construct
  misc_feature 1..100: note = Synthetic
  modified_base 1..100: mod_base = OTHER; note = 2'-O-Me and PS modification may or may not be present
  source 1..100: mol_type = other RNA
gatcctcgtcgtggtgctcggttttagagctagaaatagcaagttaaaataaggctagtccgttatcaacttgaaaaagtggcaccgagtcggtgctttt

SEQ ID NO: 870 - RNA, 100 nt, synthetic construct
  misc_feature 1..100: note = Synthetic
  modified_base 1..100: mod_base = OTHER; note = 2'-O-Me and PS modification may or may not be present
  source 1..100: mol_type = other RNA
cctcgtcgtggtgctcgcgggttttagagctagaaatagcaagttaaaataaggctagtccgttatcaacttgaaaaagtggcaccgagtcggtgctttt

SEQ ID NO: 871 - RNA, 100 nt, synthetic construct
  misc_feature 1..100: note = Synthetic
  modified_base 1..100: mod_base = OTHER; note = 2'-O-Me and PS modification may or may not be present
  source 1..100: mol_type = other RNA
gcatcgcgccaggacggtctgttttagagctagaaatagcaagttaaaataaggctagtccgttatcaacttgaaaaagtggcaccgagtcggtgctttt

SEQ ID NO: 872 - RNA, 100 nt, synthetic construct
  misc_feature 1..100: note = Synthetic
  modified_base 1..100: mod_base = OTHER; note = 2'-O-Me and PS modification may or may not be present
  source 1..100: mol_type = other RNA
tgtacttgacgcatcgcgccgttttagagctagaaatagcaagttaaaataaggctagtccgttatcaacttgaaaaagtggcaccgagtcggtgctttt

SEQ ID NO: 873 - RNA, 100 nt, synthetic construct
  misc_feature 1..100: note = Synthetic
  modified_base 1..100: mod_base = OTHER; note = 2'-O-Me and PS modification may or may not be present
  source 1..100: mol_type = other RNA
caccgggctgaactcgcagtgttttagagctagaaatagcaagttaaaataaggctagtccgttatcaacttgaaaaagtggcaccgagtcggtgctttt

SEQ ID NO: 874 - RNA, 100 nt, synthetic construct
  misc_feature 1..100: note = Synthetic
  modified_base 1..100: mod_base = OTHER; note = 2'-O-Me and PS modification may or may not be present
  source 1..100: mol_type = other RNA
tcgcggtggtcgtcccgagggttttagagctagaaatagcaagttaaaataaggctagtccgttatcaacttgaaaaagtggcaccgagtcggtgctttt

SEQ ID NO: 875 - RNA, 100 nt, synthetic construct
  misc_feature 1..100: note = Synthetic
  modified_base 1..100: mod_base = OTHER; note = 2'-O-Me and PS modification may or may not be present
  source 1..100: mol_type = other RNA
ccaccgcgagcaccacgacggttttagagctagaaatagcaagttaaaataaggctagtccgttatcaacttgaaaaagtggcaccgagtcggtgctttt

SEQ ID NO: 876 - RNA, 100 nt, synthetic construct
  misc_feature 1..100: note = Synthetic
  modified_base 1..100: mod_base = OTHER; note = 2'-O-Me and PS modification may or may not be present
  source 1..100: mol_type = other RNA
catcgcgccaggacggtctcgttttagagctagaaatagcaagttaaaataaggctagtccgttatcaacttgaaaaagtggcaccgagtcggtgctttt

SEQ ID NO: 877 - RNA, 100 nt, synthetic construct
  misc_feature 1..100: note = Synthetic
  modified_base 1..100: mod_base = OTHER; note = 2'-O-Me and PS modification may or may not be present
  source 1..100: mol_type = other RNA
gacggtctcgggaaagcgctgttttagagctagaaatagcaagttaaaataaggctagtccgttatcaacttgaaaaagtggcaccgagtcggtgctttt

SEQ ID NO: 878 - RNA, 100 nt, synthetic construct
  misc_feature 1..100: note = Synthetic
  modified_base 1..100: mod_base = OTHER; note = 2'-O-Me and PS modification may or may not be present
  source 1..100: mol_type = other RNA
gcgctttcccgagaccgtccgttttagagctagaaatagcaagttaaaataaggctagtccgttatcaacttgaaaaagtggcaccgagtcggtgctttt

SEQ ID NO: 879 - RNA, 100 nt, synthetic construct
  misc_feature 1..100: note = Synthetic
  modified_base 1..100: mod_base = OTHER; note = 2'-O-Me and PS modification may or may not be present
  source 1..100: mol_type = other RNA
cttgacgcatcgcgccaggagttttagagctagaaatagcaagttaaaataaggctagtccgttatcaacttgaaaaagtggcaccgagtcggtgctttt

SEQ ID NO: 880 - RNA, 100 nt, synthetic construct
  misc_feature 1..100: note = Synthetic
  modified_base 1..100: mod_base = OTHER; note = 2'-O-Me and PS modification may or may not be present
  source 1..100: mol_type = other RNA
tgcgagttcagcccggtgtcgttttagagctagaaatagcaagttaaaataaggctagtccgttatcaacttgaaaaagtggcaccgagtcggtgctttt

SEQ ID NO: 881 - RNA, 100 nt, synthetic construct
  misc_feature 1..100: note = Synthetic
  modified_base 1..100: mod_base = OTHER; note = 2'-O-Me and PS modification may or may not be present
  source 1..100: mol_type = other RNA
tgctcgcggtggtcgtcccggttttagagctagaaatagcaagttaaaataaggctagtccgttatcaacttgaaaaagtggcaccgagtcggtgctttt

SEQ ID NO: 882 - RNA, 100 nt, synthetic construct
  misc_feature 1..100: note = Synthetic
  modified_base 1..100: mod_base = OTHER; note = 2'-O-Me and PS modification may or may not be present
  source 1..100: mol_type = other RNA
agggtttgtccccggacaccgttttagagctagaaatagcaagttaaaataaggctagtccgttatcaacttgaaaaagtggcaccgagtcggtgctttt

SEQ ID NO: 883 - RNA, 100 nt, synthetic construct
  misc_feature 1..100: note = Synthetic
  modified_base 1..100: mod_base = OTHER; note = 2'-O-Me and PS modification may or may not be present
  source 1..100: mol_type = other RNA
gcgagttcagcccggtgtccgttttagagctagaaatagcaagttaaaataaggctagtccgttatcaacttgaaaaagtggcaccgagtcggtgctttt

SEQ ID NO: 884 - RNA, 100 nt, synthetic construct
  misc_feature 1..100: note = Synthetic
  modified_base 1..100: mod_base = OTHER; note = 2'-O-Me and PS modification may or may not be present
  source 1..100: mol_type = other RNA
ggtctcgggaaagcgcttgggttttagagctagaaatagcaagttaaaataaggctagtccgttatcaacttgaaaaagtggcaccgagtcggtgctttt

SEQ ID NO: 885 - RNA, 100 nt, synthetic construct
  misc_feature 1..100: note = Synthetic
  modified_base 1..100: mod_base = OTHER; note = 2'-O-Me and PS modification may or may not be present
  source 1..100: mol_type = other RNA
cgagttcagcccggtgtccggttttagagctagaaatagcaagttaaaataaggctagtccgttatcaacttgaaaaagtggcaccgagtcggtgctttt

SEQ ID NO: 886 - RNA, 100 nt, synthetic construct
  misc_feature 1..100: note = Synthetic
  modified_base 1..100: mod_base = OTHER; note = 2'-O-Me and PS modification may or may not be present
  source 1..100: mol_type = other RNA
ccggcagcagggtttgtcccgttttagagctagaaatagcaagttaaaataaggctagtccgttatcaacttgaaaaagtggcaccgagtcggtgctttt

SEQ ID NO: 887 - RNA, 100 nt, synthetic construct
  misc_feature 1..100: note = Synthetic
  modified_base 1..100: mod_base = OTHER; note = 2'-O-Me and PS modification may or may not be present
  source 1..100: mol_type = other RNA
gttgggctctcctagagagcgttttagagctagaaatagcaagttaaaataaggctagtccgttatcaacttgaaaaagtggcaccgagtcggtgctttt

SEQ ID NO: 888 - RNA, 100 nt, synthetic construct
  misc_feature 1..100: note = Synthetic
  modified_base 1..100: mod_base = OTHER; note = 2'-O-Me and PS modification may or may not be present
  source 1..100: mol_type = other RNA
cgagcaccacgacgaggatcgttttagagctagaaatagcaagttaaaataaggctagtccgttatcaacttgaaaaagtggcaccgagtcggtgctttt

SEQ ID NO: 889 - RNA, 100 nt, synthetic construct
  misc_feature 1..100: note = Synthetic
  modified_base 1..100: mod_base = OTHER; note = 2'-O-Me and PS modification may or may not be present
  source 1..100: mol_type = other RNA
ggccaactgcgagttcagccgttttagagctagaaatagcaagttaaaataaggctagtccgttatcaacttgaaaaagtggcaccgagtcggtgctttt

SEQ ID NO: 890 - RNA, 100 nt, synthetic construct
  misc_feature 1..100: note = Synthetic
  modified_base 1..100: mod_base = OTHER; note = 2'-O-Me and PS modification may or may not be present
  source 1..100: mol_type = other RNA
tactgacgccaagacagagtgttttagagctagaaatagcaagttaaaataaggctagtccgttatcaacttgaaaaagtggcaccgagtcggtgctttt

SEQ ID NO: 891 - RNA, 100 nt, synthetic construct
  misc_feature 1..100: note = Synthetic
  modified_base 1..100: mod_base = OTHER; note = 2'-O-Me and PS modification may or may not be present
  source 1..100: mol_type = other RNA
tcgccaacccacctcatctcgttttagagctagaaatagcaagttaaaataaggctagtccgttatcaacttgaaaaagtggcaccgagtcggtgctttt

SEQ ID NO: 892 - RNA, 100 nt, synthetic construct
  misc_feature 1..100: note = Synthetic
  modified_base 1..100: mod_base = OTHER; note = 2'-O-Me and PS modification may or may not be present
  source 1..100: mol_type = other RNA
ccggggacaaaccctgctgcgttttagagctagaaatagcaagttaaaataaggctagtccgttatcaacttgaaaaagtggcaccgagtcggtgctttt

SEQ ID NO: 893 - RNA, 100 nt, synthetic construct
  misc_feature 1..100: note = Synthetic
  modified_base 1..100: mod_base = OTHER; note = 2'-O-Me and PS modification may or may not be present
  source 1..100: mol_type = other RNA
ggaaagcgcttggtggtgccgttttagagctagaaatagcaagttaaaataaggctagtccgttatcaacttgaaaaagtggcaccgagtcggtgctttt

SEQ ID NO: 894 - RNA, 100 nt, synthetic construct
  misc_feature 1..100: note = Synthetic
  modified_base 1..100: mod_base = OTHER; note = 2'-O-Me and PS modification may or may not be present
  source 1..100: mol_type = other RNA
tctcctagagagccggcagcgttttagagctagaaatagcaagttaaaataaggctagtccgttatcaacttgaaaaagtggcaccgagtcggtgctttt

SEQ ID NO: 895 - RNA, 100 nt, synthetic construct
  misc_feature 1..100: note = Synthetic
  modified_base 1..100: mod_base = OTHER; note = 2'-O-Me and PS modification may or may not be present
  source 1..100: mol_type = other RNA
cgccagcagtggagcggtccgttttagagctagaaatagcaagttaaaataaggctagtccgttatcaacttgaaaaagtggcaccgagtcggtgctttt

SEQ ID NO: 896 - RNA, 100 nt, synthetic construct
  misc_feature 1..100: note = Synthetic
  modified_base 1..100: mod_base = OTHER; note = 2'-O-Me and PS modification may or may not be present
  source 1..100: mol_type = other RNA
ctccactgctggcgccacctgttttagagctagaaatagcaagttaaaataaggctagtccgttatcaacttgaaaaagtggcaccgagtcggtgctttt

SEQ ID NO: 897 - RNA, 100 nt, synthetic construct
  misc_feature 1..100: note = Synthetic
  modified_base 1..100: mod_base = OTHER; note = 2'-O-Me and PS modification may or may not be present
  source 1..100: mol_type = other RNA
cagggtttgtccccggacacgttttagagctagaaatagcaagttaaaataaggctagtccgttatcaacttgaaaaagtggcaccgagtcggtgctttt

SEQ ID NO: 898 - RNA, 100 nt, synthetic construct
  misc_feature 1..100: note = Synthetic
  modified_base 1..100: mod_base = OTHER; note = 2'-O-Me and PS modification may or may not be present
  source 1..100: mol_type = other RNA
ctgtcttggcgtcagtatccgttttagagctagaaatagcaagttaaaataaggctagtccgttatcaacttgaaaaagtggcaccgagtcggtgctttt

SEQ ID NO: 899 - RNA, 100 nt, synthetic construct
  misc_feature 1..100: note = Synthetic
  modified_base 1..100: mod_base = OTHER; note = 2'-O-Me and PS modification may or may not be present
  source 1..100: mol_type = other RNA
tgcccggaccgctccactgcgttttagagctagaaatagcaagttaaaataaggctagtccgttatcaacttgaaaaagtggcaccgagtcggtgctttt

SEQ ID NO: 900 - RNA, 100 nt, synthetic construct
  misc_feature 1..100: note = Synthetic
  modified_base 1..100: mod_base = OTHER; note = 2'-O-Me and PS modification may or may not be present
  source 1..100: mol_type = other RNA
ctcctagagagccggcagcagttttagagctagaaatagcaagttaaaataaggctagtccgttatcaacttgaaaaagtggcaccgagtcggtgctttt

SEQ ID NO: 901 - RNA, 100 nt, synthetic construct
  misc_feature 1..100: note = Synthetic
  modified_base 1..100: mod_base = OTHER; note = 2'-O-Me and PS modification may or may not be present
  source 1..100: mol_type = other RNA
cctggtcctgatcctcgtcggttttagagctagaaatagcaagttaaaataaggctagtccgttatcaacttgaaaaagtggcaccgagtcggtgctttt

SEQ ID NO: 902 - RNA, 100 nt, synthetic construct
  misc_feature 1..100: note = Synthetic
  modified_base 1..100: mod_base = OTHER; note = 2'-O-Me and PS modification may or may not be present
  source 1..100: mol_type = other RNA
tcccgaggtggcgccagcaggttttagagctagaaatagcaagttaaaataaggctagtccgttatcaacttgaaaaagtggcaccgagtcggtgctttt

SEQ ID NO: 903 - RNA, 100 nt, synthetic construct
  misc_feature 1..100: note = Synthetic
  modified_base 1..100: mod_base = OTHER; note = 2'-O-Me and PS modification may or may not be present
  source 1..100: mol_type = other RNA
gcgccagcagtggagcggtcgttttagagctagaaatagcaagttaaaataaggctagtccgttatcaacttgaaaaagtggcaccgagtcggtgctttt

SEQ ID NO: 904 - RNA, 100 nt, synthetic construct
  misc_feature 1..100: note = Synthetic
  modified_base 1..100: mod_base = OTHER; note = 2'-O-Me and PS modification may or may not be present
  source 1..100: mol_type = other RNA
tccactgctggcgccacctcgttttagagctagaaatagcaagttaaaataaggctagtccgttatcaacttgaaaaagtggcaccgagtcggtgctttt

SEQ ID NO: 905 - RNA, 100 nt, synthetic construct
  misc_feature 1..100: note = Synthetic
  modified_base 1..100: mod_base = OTHER; note = 2'-O-Me and PS modification may or may not be present
  source 1..100: mol_type = other RNA
aggagagcccaactctgtctgttttagagctagaaatagcaagttaaaataaggctagtccgttatcaacttgaaaaagtggcaccgagtcggtgctttt

SEQ ID NO: 906 - RNA, 100 nt, synthetic construct
  misc_feature 1..100: note = Synthetic
  modified_base 1..100: mod_base = OTHER; note = 2'-O-Me and PS modification may or may not be present
  source 1..100: mol_type = other RNA
actgacgccaagacagagttgttttagagctagaaatagcaagttaaaataaggctagtccgttatcaacttgaaaaagtggcaccgagtcggtgctttt

SEQ ID NO: 907 - RNA, 100 nt, synthetic construct
  misc_feature 1..100: note = Synthetic
  modified_base 1..100: mod_base = OTHER; note = 2'-O-Me and PS modification may or may not be present
  source 1..100: mol_type = other RNA
aaccctgctgccggctctctgttttagagctagaaatagcaagttaaaataaggctagtccgttatcaacttgaaaaagtggcaccgagtcggtgctttt

SEQ ID NO: 908 - RNA, 100 nt, synthetic construct
  misc_feature 1..100: note = Synthetic
  modified_base 1..100: mod_base = OTHER; note = 2'-O-Me and PS modification may or may not be present
  source 1..100: mol_type = other RNA
tatcagccactaatgaagttgttttagagctagaaatagcaagttaaaataaggctagtccgttatcaacttgaaaaagtggcaccgagtcggtgctttt

SEQ ID NO: 909 - RNA, 100 nt, synthetic construct
  misc_feature 1..100: note = Synthetic
  modified_base 1..100: mod_base = OTHER; note = 2'-O-Me and PS modification may or may not be present
  source 1..100: mol_type = other RNA
tgaaagcatcccatacacttgttttagagctagaaatagcaagttaaaataaggctagtccgttatcaacttgaaaaagtggcaccgagtcggtgctttt

SEQ ID NO: 910 - RNA, 100 nt, synthetic construct
  misc_feature 1..100: note = Synthetic
  modified_base 1..100: mod_base = OTHER; note = 2'-O-Me and PS modification may or may not be present
  source 1..100: mol_type = other RNA
cccccaattaccttgttgcagttttagagctagaaatagcaagttaaaataaggctagtccgttatcaacttgaaaaagtggcaccgagtcggtgctttt

SEQ ID NO: 911 - RNA, 100 nt, synthetic construct
  misc_feature 1..100: note = Synthetic
  modified_base 1..100: mod_base = OTHER; note = 2'-O-Me and PS modification may or may not be present
  source 1..100: mol_type = other RNA
atgtagactgccaaagtgtagttttagagctagaaatagcaagttaaaataaggctagtccgttatcaacttgaaaaagtggcaccgagtcggtgctttt

SEQ ID NO: 912 - RNA, 100 nt, synthetic construct
  misc_feature 1..100: note = Synthetic
  modified_base 1..100: mod_base = OTHER; note = 2'-O-Me and PS modification may or may not be present
  source 1..100: mol_type = other RNA
aagtgtatgggatgctttcagttttagagctagaaatagcaagttaaaataaggctagtccgttatcaacttgaaaaagtggcaccgagtcggtgctttt

SEQ ID NO: 913 - RNA, 100 nt, synthetic construct
  misc_feature 1..100: note = Synthetic
  modified_base 1..100: mod_base = OTHER; note = 2'-O-Me and PS modification may or may not be present
  source 1..100: mol_type = other RNA
aattaccttgttgcaaggtagttttagagctagaaatagcaagttaaaataaggctagtccgttatcaacttgaaaaagtggcaccgagtcggtgctttt

SEQ ID NO: 914 - RNA, 100 nt, synthetic construct
  misc_feature 1..100: note = Synthetic
  modified_base 1..100: mod_base = OTHER; note = 2'-O-Me and PS modification may or may not be present
  source 1..100: mol_type = other RNA
tgagttcccaacttcattaggttttagagctagaaatagcaagttaaaataaggctagtccgttatcaacttgaaaaagtggcaccgagtcggtgctttt

SEQ ID NO: 915 - RNA, 100 nt, synthetic construct
  misc_feature 1..100: note = Synthetic
  modified_base 1..100: mod_base = OTHER; note = 2'-O-Me and PS modification may or may not be present
  source 1..100: mol_type = other RNA
tgtagactgccaaagtgtatgttttagagctagaaatagcaagttaaaataaggctagtccgttatcaacttgaaaaagtggcaccgagtcggtgctttt

SEQ ID NO: 916 - RNA, 100 nt, synthetic construct
  misc_feature 1..100: note = Synthetic
  modified_base 1..100: mod_base = OTHER; note = 2'-O-Me and PS modification may or may not be present
  source 1..100: mol_type = other RNA
agtgtatgggatgctttcaagttttagagctagaaatagcaagttaaaataaggctagtccgttatcaacttgaaaaagtggcaccgagtcggtgctttt

SEQ ID NO: 917 - RNA, 100 nt, synthetic construct
  misc_feature 1..100: note = Synthetic
  modified_base 1..100: mod_base = OTHER; note = 2'-O-Me and PS modification may or may not be present
  source 1..100: mol_type = other RNA
ctatcagccactaatgaagtgttttagagctagaaatagcaagttaaaataaggctagtccgttatcaacttgaaaaagtggcaccgagtcggtgctttt

SEQ ID NO: 918 - RNA, 100 nt, synthetic construct
  misc_feature 1..100: note = Synthetic
  modified_base 1..100: mod_base = OTHER; note = 2'-O-Me and PS modification may or may not be present
  source 1..100: mol_type = other RNA
tcttcttcagtaatgttgcagttttagagctagaaatagcaagttaaaataaggctagtccgttatcaacttgaaaaagtggcaccgagtcggtgctttt

SEQ ID NO: 919 - RNA, 100 nt, synthetic construct
  misc_feature 1..100: note = Synthetic
  modified_base 1..100: mod_base = OTHER; note = 2'-O-Me and PS modification may or may not be present
  source 1..100: mol_type = other RNA
tctggcccatcagttcacacgttttagagctagaaatagcaagttaaaataaggctagtccgttatcaacttgaaaaagtggcaccgagtcggtgctttt

SEQ ID NO: 920 - RNA, 100 nt, synthetic construct
  misc_feature 1..100: note = Synthetic
  modified_base 1..100: mod_base = OTHER; note = 2'-O-Me and PS modification may or may not be present
  source 1..100: mol_type = other RNA
gcgggacatgttcaccctgggttttagagctagaaatagcaagttaaaataaggctagtccgttatcaacttgaaaaagtggcaccgagtcggtgctttt

SEQ ID NO: 921 - RNA, 100 nt, synthetic construct
  misc_feature 1..100: note = Synthetic
  modified_base 1..100: mod_base = OTHER; note = 2'-O-Me and PS modification may or may not be present
  source 1..100: mol_type = other RNA
ccagcgggacatgttcacccgttttagagctagaaatagcaagttaaaataaggctagtccgttatcaacttgaaaaagtggcaccgagtcggtgctttt

SEQ ID NO: 922 - RNA, 100 nt, synthetic construct
  misc_feature 1..100: note = Synthetic
  modified_base 1..100: mod_base = OTHER; note = 2'-O-Me and PS modification may or may not be present
  source 1..100: mol_type = other RNA
agcctagcagcgtgtcctccgttttagagctagaaatagcaagttaaaataaggctagtccgttatcaacttgaaaaagtggcaccgagtcggtgctttt

SEQ ID NO: 923 - RNA, 100 nt, synthetic construct
  misc_feature 1..100: note = Synthetic
  modified_base 1..100: mod_base = OTHER; note = 2'-O-Me and PS modification may or may not be present
  source 1..100: mol_type = other RNA
tgaattcaccacaccatgtggttttagagctagaaatagcaagttaaaataaggctagtccgttatcaacttgaaaaagtggcaccgagtcggtgctttt

SEQ ID NO: 924 - RNA, 100 nt, synthetic construct
  misc_feature 1..100: note = Synthetic
  modified_base 1..100: mod_base = OTHER; note = 2'-O-Me and PS modification may or may not be present
  source 1..100: mol_type = other RNA
atcagttcacacaggtccaggttttagagctagaaatagcaagttaaaataaggctagtccgttatcaacttgaaaaagtggcaccgagtcggtgctttt

SEQ ID NO: 925 - RNA, 100 nt, synthetic construct
  misc_feature 1..100: note = Synthetic
  modified_base 1..100: mod_base = OTHER; note = 2'-O-Me and PS modification may or may not be present
  source 1..100: mol_type = other RNA
gctgatgacctcacatggtggttttagagctagaaatagcaagttaaaataaggctagtccgttatcaacttgaaaaagtggcaccgagtcggtgctttt

SEQ ID NO: 926 - RNA, 100 nt, synthetic construct
  misc_feature 1..100: note = Synthetic
  modified_base 1..100: mod_base = OTHER; note = 2'-O-Me and PS modification may or may not be present
  source 1..100: mol_type = other RNA
gcctagcagcgtgtcctccagttttagagctagaaatagcaagttaaaataaggctagtccgttatcaacttgaaaaagtggcaccgagtcggtgctttt

SEQ ID NO: 927 - RNA, 100 nt, synthetic construct
  misc_feature 1..100: note = Synthetic
  modified_base 1..100: mod_base = OTHER; note = 2'-O-Me and PS modification may or may not be present
  source 1..100: mol_type = other RNA
accatgtgaggtcatcagcagttttagagctagaaatagcaagttaaaataaggctagtccgttatcaacttgaaaaagtggcaccgagtcggtgctttt

SEQ ID NO: 928 - RNA, 100 nt, synthetic construct
  misc_feature 1..100: note = Synthetic
  modified_base 1..100: mod_base = OTHER; note = 2'-O-Me and PS modification may or may not be present
  source 1..100: mol_type = other RNA
tcagttcacacaggtccagcgttttagagctagaaatagcaagttaaaataaggctagtccgttatcaacttgaaaaagtggcaccgagtcggtgctttt

SEQ ID NO: 929 - RNA, 100 nt, synthetic construct
  misc_feature 1..100: note = Synthetic
  modified_base 1..100: mod_base = OTHER; note = 2'-O-Me and PS modification may or may not be present for detailed description of substitutions and preferred
  source 1..100: mol_type = other RNA
ccagggtgaacatgtcccgcgttttagagctagaaatagcaagttaaaataaggctagtccgttatcaacttgaaaaagtggcaccgagtcggtgctttt

SEQ ID NO: 930 - RNA, 100 nt, synthetic construct
  misc_feature 1..100: note = Synthetic
  modified_base 1..100: mod_base = OTHER; note = 2'-O-Me and PS modification may or may not be present
  source 1..100: mol_type = other RNA
gctggacctgtgtgaactgagttttagagctagaaatagcaagttaaaataaggctagtccgttatcaacttgaaaaagtggcaccgagtcggtgctttt

SEQ ID NO: 931 - RNA, 100 nt, synthetic construct
  misc_feature 1..100: note = Synthetic
  modified_base 1..100: mod_base = OTHER; note = 2'-O-Me and PS modification may or may not be present
  source 1..100: mol_type = other RNA
accctggaggacacgctgctgttttagagctagaaatagcaagttaaaataaggctagtccgttatcaacttgaaaaagtggcaccgagtcggtgctttt

SEQ ID NO: 932 - RNA, 100 nt, synthetic construct
  misc_feature 1..100: note = Synthetic
  modified_base 1..100: mod_base = OTHER; note = 2'-O-Me and PS modification may or may not be present
  source 1..100: mol_type = other RNA
ctggacctgtgtgaactgatgttttagagctagaaatagcaagttaaaataaggctagtccgttatcaacttgaaaaagtggcaccgagtcggtgctttt

SEQ ID NO: 933 - RNA, 100 nt, synthetic construct
  misc_feature 1..100: note = Synthetic
  modified_base 1..100: mod_base = OTHER; note = 2'-O-Me and PS modification may or may not be present
  source 1..100: mol_type = other RNA
tctggaaaacggtttcccgcgttttagagctagaaatagcaagttaaaataaggctagtccgttatcaacttgaaaaagtggcaccgagtcggtgctttt

SEQ ID NO: 934-936 - skipped (3 entries)

SEQ ID NO: 937 - RNA, 100 nt, synthetic construct
  misc_feature 1..100: note = Synthetic
  modified_base 1..100: mod_base = OTHER; note = 2'-O-Me and PS modification may or may not be present
  source 1..100: mol_type = other RNA
gttttccagaatactgaaacgttttagagctagaaatagcaagttaaaataaggctagtccgttatcaacttgaaaaagtggcaccgagtcggtgctttt

SEQ ID NO: 938 - RNA, 100 nt, synthetic construct
  misc_feature 1..100: note = Synthetic
  modified_base 1..100: mod_base = OTHER; note = 2'-O-Me and PS modification may or may not be present
  source 1..100: mol_type = other RNA
gggatccattgagcatcacagttttagagctagaaatagcaagttaaaataaggctagtccgttatcaacttgaaaaagtggcaccgagtcggtgctttt

SEQ ID NO: 939 - RNA, 100 nt, synthetic construct
  misc_feature 1..100: note = Synthetic
  modified_base 1..100: mod_base = OTHER; note = 2'-O-Me and PS modification may or may not be present
  source 1..100: mol_type = other RNA
catcacatggaccacatcacgttttagagctagaaatagcaagttaaaataaggctagtccgttatcaacttgaaaaagtggcaccgagtcggtgctttt

SEQ ID NO: 940 - RNA, 100 nt, synthetic construct
  misc_feature 1..100: note = Synthetic
  modified_base 1..100: mod_base = OTHER; note = 2'-O-Me and PS modification may or may not be present
  source 1..100: mol_type = other RNA
gtggtccatgtgatgctcaagttttagagctagaaatagcaagttaaaataaggctagtccgttatcaacttgaaaaagtggcaccgagtcggtgctttt

SEQ ID NO: 941 - RNA, 100 nt, synthetic construct
  misc_feature 1..100: note = Synthetic
  modified_base 1..100: mod_base = OTHER; note = 2'-O-Me and PS modification may or may not be present
  source 1..100: mol_type = other RNA
agagaaggttcagacactaggttttagagctagaaatagcaagttaaaataaggctagtccgttatcaacttgaaaaagtggcaccgagtcggtgctttt

SEQ ID NO: 942 - RNA, 100 nt, synthetic construct
  misc_feature 1..100: note = Synthetic
  modified_base 1..100: mod_base = OTHER; note = 2'-O-Me and PS modification may or may not be present
  source 1..100: mol_type = other RNA
tctagtgtctgaaccttctcgttttagagctagaaatagcaagttaaaataaggctagtccgttatcaacttgaaaaagtggcaccgagtcggtgctttt

SEQ ID NO: 943 - RNA, 100 nt, synthetic construct
  misc_feature 1..100: note = Synthetic
  modified_base 1..100: mod_base = OTHER; note = 2'-O-Me and PS modification may or may not be present
  source 1..100: mol_type = other RNA
ggttcagacactagaggcctgttttagagctagaaatagcaagttaaaataaggctagtccgttatcaacttgaaaaagtggcaccgagtcggtgctttt

SEQ ID NO: 944 - RNA, 100 nt, synthetic construct
  misc_feature 1..100: note = Synthetic
  modified_base 1..100: mod_base = OTHER; note = 2'-O-Me and PS modification may or may not be present
  source 1..100: mol_type = other RNA
ccataatttgcaaccagagagttttagagctagaaatagcaagttaaaataaggctagtccgttatcaacttgaaaaagtggcaccgagtcggtgctttt

SEQ ID NO: 945 - RNA, 100 nt, synthetic construct
  misc_feature 1..100: note = Synthetic
  modified_base 1..100: mod_base = OTHER; note = 2'-O-Me and PS modification may or may not be present
  source 1..100: mol_type = other RNA
ccttctctggttgcaaattagttttagagctagaaatagcaagttaaaataaggctagtccgttatcaacttgaaaaagtggcaccgagtcggtgctttt

SEQ ID NO: 946 - RNA, 100 nt, synthetic construct
  misc_feature 1..100: note = Synthetic
  modified_base 1..100: mod_base = OTHER; note = 2'-O-Me and PS modification may or may not be present
  source 1..100: mol_type = other RNA
aggttcagacactagaggccgttttagagctagaaatagcaagttaaaataaggctagtccgttatcaacttgaaaaagtggcaccgagtcggtgctttt

SEQ ID NO: 947 - RNA, 100 nt, synthetic construct
  misc_feature 1..100: note = Synthetic
  modified_base 1..100: mod_base = OTHER; note = 2'-O-Me and PS modification may or may not be present
  source 1..100: mol_type = other RNA
ctagaggcctgggtgatacagttttagagctagaaatagcaagttaaaataaggctagtccgttatcaacttgaaaaagtggcaccgagtcggtgctttt

SEQ ID NO: 948 - RNA, 100 nt, synthetic construct
  misc_feature 1..100: note = Synthetic
  modified_base 1..100: mod_base = OTHER; note = 2'-O-Me and PS modification may or may not be present
  source 1..100: mol_type = other RNA
ttttagcacttttgggagtggttttagagctagaaatagcaagttaaaataaggctagtccgttatcaacttgaaaaagtggcaccgagtcggtgctttt

SEQ ID NO: 949 - RNA, 100 nt, synthetic construct
  misc_feature 1..100: note = Synthetic
  modified_base 1..100: mod_base = OTHER; note = 2'-O-Me and PS modification may or may not be present
  source 1..100: mol_type = other RNA
tcttccaccatgtatcacccgttttagagctagaaatagcaagttaaaataaggctagtccgttatcaacttgaaaaagtggcaccgagtcggtgctttt

SEQ ID NO: 950 - RNA, 100 nt, synthetic construct
  misc_feature 1..100: note = Synthetic
  modified_base 1..100: mod_base = OTHER; note = 2'-O-Me and PS modification may or may not be present
  source 1..100: mol_type = other RNA
cttccccagagacttatgccgttttagagctagaaatagcaagttaaaataaggctagtccgttatcaacttgaaaaagtggcaccgagtcggtgctttt

SEQ ID NO: 951 - RNA, 100 nt, synthetic construct
  misc_feature 1..100: note = Synthetic
  modified_base 1..100: mod_base = OTHER; note = 2'-O-Me and PS modification may or may not be present
  source 1..100: mol_type = other RNA
ttacctgtagatattcttgcgttttagagctagaaatagcaagttaaaataaggctagtccgttatcaacttgaaaaagtggcaccgagtcggtgctttt

SEQ ID NO: 952 - RNA, 100 nt, synthetic construct
  misc_feature 1..100: note = Synthetic
  modified_base 1..100: mod_base = OTHER; note = 2'-O-Me and PS modification may or may not be present
  source 1..100: mol_type = other RNA
gctcttttatggtgggatccgttttagagctagaaatagcaagttaaaataaggctagtccgttatcaacttgaaaaagtggcaccgagtcggtgctttt

SEQ ID NO: 953 - RNA, 100 nt, synthetic construct
  misc_feature 1..100: note = Synthetic
  modified_base 1..100: mod_base = OTHER; note = 2'-O-Me and PS modification may or may not be present
  source 1..100: mol_type = other RNA
ggatcccaccataaaagagcgttttagagctagaaatagcaagttaaaataaggctagtccgttatcaacttgaaaaagtggcaccgagtcggtgctttt

SEQ ID NO: 954 - RNA, 100 nt, synthetic construct
  misc_feature 1..100: note = Synthetic
  modified_base 1..100: mod_base = OTHER; note = 2'-O-Me and PS modification may or may not be present
  source 1..100: mol_type = other RNA
cgattccagctcttttatgggttttagagctagaaatagcaagttaaaataaggctagtccgttatcaacttgaaaaagtggcaccgagtcggtgctttt

SEQ ID NO: 955 - RNA, 100 nt, synthetic construct
  misc_feature 1..100: note = Synthetic
  modified_base 1..100: mod_base = OTHER; note = 2'-O-Me and PS modification may or may not be present
  source 1..100: mol_type = other RNA
gattccagctcttttatggtgttttagagctagaaatagcaagttaaaataaggctagtccgttatcaacttgaaaaagtggcaccgagtcggtgctttt

SEQ ID NO: 956 - RNA, 100 nt, synthetic construct
  misc_feature 1..100: note = Synthetic
  modified_base 1..100: mod_base = OTHER; note = 2'-O-Me and PS modification may or may not be present
  source 1..100: mol_type = other RNA
aatcgattccagctcttttagttttagagctagaaatagcaagttaaaataaggctagtccgttatcaacttgaaaaagtggcaccgagtcggtgctttt

SEQ ID NO: 957-959 - skipped (3 entries)

SEQ ID NO: 960 - protein, 113 aa, synthetic construct
  REGION 1..113: note = Synthetic
MSSETGPVAVDPTLRRRIEPHEFEVFFDPRELRKETCLLYEINWGGRHSVWRHTSQNTSNHVEVNFLEKFTTERYFRPNTRCSITWFLSWSPCGECSRAITEFLSRHPYVTLF

SEQ ID NO: 961 - protein, 121 aa, synthetic construct
  REGION 1..121: note = Synthetic
MSSETGPVAVDPTLRRRIEPHEFEVFFDPRELRKETCLLYEINWGGRHSVWRHTSQNTSNHVEVNFLEKFTTERYFRPNTRCSITWFLSWSPCGECSRAITEFLSRHPYVTLFIYIARLYH

SEQ ID NO: 962 - protein, 128 aa, synthetic construct
  REGION 1..128: note = Synthetic
MNWNALRSKAIEVSRHAYAPYSGFPVGAAALVDDGRTVTGCNVENVSYGLGLCAECAVVCALHSGGGGRLVALSCVGPDGGVLMPCGRCRQVLLEHGGPELLIDHAHGPRPLRELLPDAFGPDDLGRR

SEQ ID NO: 963 - protein, 130 aa, synthetic construct
  REGION 1..130: note = Synthetic
MTHHALIEAAKAAREKAYAPYSNFKVGAALVTNDGKVFHGCNVENASYGLCNCAERTALFSALAAGYRPGEFAAIAVVGETHGPIAPCGACRQVMIELGKPTLEVVLTNMQGDVRVTSAGDLLPDAFYLA

SEQ ID NO: 964 - protein, 132 aa, synthetic construct
  REGION 1..132: note = Synthetic
MPDIDWKQLRDKATQVAAGAYAPYSRFPVGAAALVDDGRVVTGCNVENVSYGLALCAECGVVCALHATGGGRLVALACVDGRGAPLMPCGRCRQLLFEHGGPELLVDHLAGPRRLGDLLPEPFHADLTGEPT

SEQ ID NO: 965 - protein, 132 aa, synthetic construct
  REGION 1..132: note = Synthetic
MNSKQLIQEAIEARKQAYVPYSKFQVGAALLTQDGKVYRGCNVENASYGLCNCAERTALFKAVSEGDKEFVAIAIVADTKRPVPPCGACRQVMVELCKQDTKVYLSNLHGDVQETTVGELLPGAFLAEDLHE

SEQ ID NO: 966 - protein, 133 aa, synthetic construct
  REGION 1..133: note = Synthetic
MPDVDWNMLRGNATQAAAGAYVPYSRFAVGAAALVDDGRVVTGCNVENVSYGLTLCAECAVVCALHSTGGGRLLALACVDGHGSVLMPCGRCRQVLLEHGGSELLIDHPVRPRRLGDLLPDAFGLDDLPRERR

SEQ ID NO: 967 - protein, 134 aa, synthetic construct
  REGION 1..134: note = Synthetic
MGDVNWDTLQKAAVAARANSYAPYSNFPVGVAGFVNDGRLITGVNVENASYGLALCAECSMISALYATGGGRLVAVYCVDGNGDSLMPCGRCRQLLYEHGGPELKIMTPKGVQTMAQLLPQAFNPQERIFGNDE

SEQ ID NO: 968 - protein, 136 aa, synthetic construct
  REGION 1..136: note = Synthetic
MNRQELITEALKARDMAYAPYSKFQVGAALLTKDGKVYRGCNIENAAYSMCNCAERTALFKAVSEGDTEFQMLAVAADTPGPVSPCGACRQVISELCTKDVIVVLTNLQGQIKEMTVEELLPGAFSSEDLHDERKL

SEQ ID NO: 969 - protein, 142 aa, synthetic construct
  REGION 1..142: note = Synthetic
MKVGGIEDRQLEALKRAALKACELSYSPYSHFRVGCSILTNNDVIFTGANVENASYSNCICAERSAMIQVLMAGHRSGWKCMVICGDSEDQCVSPCGVCRQFINEFVVKDFPIVMLNSTGSRSKVMTMGELLPMAFGPSHLN

SEQ ID NO: 970 - protein, 142 aa, synthetic construct
  REGION 1..142: note = Synthetic
MNIEQQLYDVVKQLIEQRYPNDWGGAAAIRVEDGTIYTSVAPDVINASTELCMETGAILEAHKFQKKVTHSICLARENEHSELKVLSPCGVCQERLFYWGPEVQCAITNAKQDIIFKPLKELQPYHWTEAYHDEMVKEWSTR

SEQ ID NO: 971 - protein, 146 aa, synthetic construct
  REGION 1..146: note = Synthetic
MAQERPSCAVEPEHVQRLLLSSREAKKSAYCPYSRFPVGAALLTGDGRIFSGCNIENACYPLGVCAERTAIQKAISEGYKDFRAIAISSDLQEEFISPCGACRQVMREFGTDWAVYMTKPDGTFVVRTVQELLPASFGPEDLQKIQ

SEQ ID NO: 972 - protein, 146 aa, synthetic construct [sequence omitted]

SEQ ID NO: 973 - protein, 158 aa, synthetic construct
  REGION 1..158: note = Synthetic
MVTGGMASKWDQKGMDIAYEEAALGYKEGGVPIGGCLINNKDGSVLGRGHNMRFQKGSATLHGEISTLENCGRLEGKVYKDTTLYTTLSPCDMCTGAIIMYGIPRCVVGENVNFKSKGEKYLQTRGHEVVVVDDERCKKIMKQFIDERPQDWFEDIGE

SEQ ID NO: 974 - protein, 158 aa, synthetic construct
  REGION 1..158: note = Synthetic
MTTTKANLTEFEQQLVDKAIGAMENAYCKYSNFKVGAALVCDDGEIIIGANHENASYGATICAERSAIVTALTKGHRKFKYIVVATELEAPCSPCGVCRQVLIEFGDYKVILGSSTSDQIIETTTYELLPYAFTPKSLDDHEKETEERKHHNDHNNKE

SEQ ID NO: 975 - protein, 166 aa, synthetic construct
  REGION 1..166: note = Synthetic
MAANSLPQDISDVELVHLARAAMKRAHCPYSKFPVGAALLTESGEIVQGCNVENASYGGTICAERSAIVSAVSQGYTKFRAIAVVTELSEPASPCGLCRQFLVEFGDYKVVVGTASNNKILITSTRALLPFAFTPESLDTFEQEKASEAKGLKQDDATEHNVTVVS

SEQ ID NO: 976 - protein, 190 aa, synthetic construct
  REGION 1..190: note = Synthetic
MNPQIRNPMKAMYPGTFYFQFKNLWEANDRNETWLCFTVEGIKRRSVVSWKTGVFRNQVDSETHCHAERCFLSWFCDDILSPNTKYQVTWYTSWSPCPDCAGEVAEFLARHSNVNLTIFTARLYYFQYPCYQEGLRSLSQEGVAVEIMDYEDFKYCWENFVYNDNEPFKPWKGLKTNFRLLKRRLRESLQ

SEQ ID NO: 977 - protein, 190 aa, synthetic construct
  REGION 1..190: note = Synthetic
MNPQIRNPMEAMYPHIFYFHFKNLLKACGRNESWLCFTMEVTKHHSAVFRKRGVFRNQVDPETHCHAERCFLSWFCDDILSPNTNYEVTWYTSWSPCPECAGEVAEFLARHSNVNLTIFTARLCYFWDTDYQEGLCSLSQEGASVKIMGYKDFVSCWKNFVYSDDEPFKPWKGLQTNFRLLKRRLREILQ

SEQ ID NO: 978 - protein, 193 aa, synthetic construct
  REGION 1..193: note = Synthetic
MNDALHIGLPPFLVQANNEPRVLAAPEARMGYVLELVRANIAADGGPFAAAVFERDSGLLIAAGTNRVVPGRCSAAHAEILALSLAQAKLDTHDLSADGLPACELVTSAEPCVMCFGAVIWSGVRSLVCAARSDDVEAIGFDEGPRPENWMGGLEARGITVTTGLLRDAACALLREYNACNGVIYNARCGVHK

SEQ ID NO: 979 - protein, 198 aa, synthetic construct [sequence omitted]

SEQ ID NO: 980 - protein, 198 aa, synthetic construct
  REGION 1..198: note = Synthetic
MDSLLMKQKKFLYHFKNVRWAKGRHETYLCYVVKRRDSATSCSLDFGHLRNKSGCHVELLFLRYISDWDLDPGRCYRVTWFTSWSPCYDCARHVAEFLRWNPNLSLRIFTARLYFCEDRKAEPEGLRRLHRAGVQIGIMTFKDYFYCWNTFVENRERTFKAWEGLHENSVRLTRQLRRILLPLYEVDDLRDAFRMLGF

SEQ ID NO: 981 - protein, 200 aa, synthetic construct
  REGION 1..200: note = Synthetic
MALLTAETFRLQFNNKRRLRRPYYPRKALLCYQLTPQNGSTPTRGYFENKKKCHAEICFINEIKSMGLDETQCYQVTCYLTWSPCSSCAWELVDFIKAHDHLNLGIFASRLYYHWCKPQQKGLRLLCGSQVPVEVMGFPKFADCWENFVDHEKPLSFNPYKMLEELDKNSRAIKRRLERIKIPGVRAQGRYMDILCDAEV

SEQ ID NO: 982 - protein, 224 aa, synthetic construct
  REGION 1..224: note = Synthetic
MAQKEEAAVATEAASQNGEDLENLDDPEKLKELIELPPFEIVTGERLPANFFKFQFRNVEYSSGRNKTFLCYVVEAQGKGGQVQASRGYLEDEHAAAHAEEAFFNTILPAFDPALRYNVTWYVSSSPCAACADRIIKTLSKTKNLRLLILVGRLFMWEEPEIQAALKKLKEAGCKLRIMKPQDFEYVWQNFVEQEEGESKAFQPWEDIQENFLYYEEKLADILK

SEQ ID NO: 983 - protein, 224 aa, synthetic construct
  REGION 1..224: note = Synthetic
MAQKEEAAEAAAPASQNGDDLENLEDPEKLKELIDLPPFEIVTGVRLPVNFFKFQFRNVEYSSGRNKTFLCYVVEVQSKGGQAQATQGYLEDEHAGAHAEEAFFNTILPAFDPALKYNVTWYVSSSPCAACADRILKTLSKTKNLRLLILVSRLFMWEEPEVQAALKKLKEAGCKLRIMKPQDFEYIWQNFVEQEEGESKAFEPWEDIQENFLYYEEKLADILK

SEQ ID NO: 984 - protein, 229 aa, synthetic construct
  REGION 1..229: note = Synthetic
MSSETGPVAVDPTLRRRIEPHEFEVFFDPRELRKETCLLYEINWGGRHSVWRHTSQNTSNHVEVNFLEKFTTERYFRPNTRCSITWFLSWSPCGECSRAITEFLSRHPYVTLFIYIARLYHHTDQRNRQGLRDLISSGVTIQIMTEQEYCYCWRNFVNYPPSNEAYWPRYPHLWVKLYVLELYCIILGLPPCLKILRRKQPQLTFFTITLQTCHYQRIPPHLLWATGLK

SEQ ID NO: 985 - protein, 235 aa, synthetic construct
  REGION 1..235: note = Synthetic
MNSKTGPSVGDATLRRRIKPWEFVAFFNPQELRKETCLLYEIKWGNQNIWRHSNQNTSQHAEINFMEKFTAERHFNSSVRCSITWFLSWSPCWECSKAIRKFLDHYPNVTLAIFISRLYWHMDQQHRQGLKELVHSGVTIQIMSYSEYHYCWRNFVDYPQGEEDYWPKYPYLWIMLYVLELHCIILGLPPCLKISGSHSNQLALFSLDLQDCHYQKIPYNVLVATGLVQPFVTWR

SEQ ID NO: 986 - protein, 236 aa, synthetic construct
  REGION 1..236: note = Synthetic
MTSEKGPSTGDPTLRRRIEPWEFDVFYDPRELRKEACLLYEIKWGMSRKIWRSSGKNTTNHVEVNFIKKFTSERDFHPSMSCSITWFLSWSPCWECSQAIREFLSRHPGVTLVIYVARLFWHMDQQNRQGLRDLVNSGVTIQIMRASEYYHCWRNFVNYPPGDEAHWPQYPPLWMMLYALELHCIILSLPPCLKISRRWQNHLTFFRLHLQNCHYQTIPPHILLATGLIHPSVAWR

SEQ ID NO: 987 - protein, 236 aa, synthetic construct
  REGION 1..236: note = Synthetic
MASEKGPSNKDYTLRRRIEPWEFEVFFDPQELRKEACLLYEIKWGASSKTWRSSGKNTTNHVEVNFLEKLTSEGRLGPSTCCSITWFLSWSPCWECSMAIREFLSQHPGVTLIIFVARLFQHMDRRNRQGLKDLVTSGVTVRVMSVSEYCYCWENFVNYPPGKAAQWPRYPPRWMLMYALELYCIILGLPPCLKISRRHQKQLTFFSLTPQYCHYKMIPPYILLATGLLQPSVPWR

SEQ ID NO: 988 - protein, 278 aa, synthetic construct
  REGION 1..278: note = Synthetic
MKVSLAGQTVDVKKILNEIPKRTVTAALLEGGEIVAVEEADDEHAERKLVRRHDVEGKVVFVTARPCLYCARELAEAGVAGVVYLGRGRGLGPYYLARSGVEVVEVHPDEPLGYDPVDRLDVLLTFGGNPYLTEEDVAARVYCLLTGRGFDADIAPAPENLSGRVEIMVTRGDPDEAVELLKEELPVFRIRRFLISGEFDRDELRERILEDIEPRILDPFAVRARIARAGAFSSSREAEVFIGDVLTSVGREVNLNDPRTVVTVDVLGPRVSVGVEKR

SEQ ID NO: 989 - protein, 294 aa, synthetic construct
  REGION 1..294: note = Synthetic
MHPRFQTAFAQLADNLQSALEPILADKYFPALLTGEQVSSLKSATGLDEDALAFALLPLAAACARTPLSNFNVGAIARGVSGTWYFGANMEFIGATMQQTVHAEQSAISHAWLSGEKALAAITVNYTPCGHCRQFMNELNSGLDLRIHLPGREAHALRDYLPDAFGPKDLEIKTLLMDEQDHGYALTGDALSQAAIAAANRSHMPYSKSPSGVALECKDGRIFSGSYAENAAFNPTLPPLQGALILLNLKGYDYPDIQRAVLAEKADAPLIQWDATSATLKALGCHSIDRVLLA

SEQ ID NO: 990 - protein, 295 aa, synthetic construct
  REGION 1..295: note = Synthetic
MRNRIEQALQQMPASFAPYLRELVLAKDFDATFSAEQYQQLLTLSGLEDADLRVALLPIAAAYSYAPISEFYVGAIVRGISGRLYLGANMEFTGAQLGQTVHAEQCAISHAWMKGEKGVADITINFSPCGHCRQFMNELTTASSLKIQLPKRAAKTLQEYLPESFGPADLGIDSGLMSPVNHGKTSDDDEELIQQALRAMNISHSPYTQNFSGVALKMRSGAIYLGAYAENAAFNPSLPPLQVALAQAMMMGESFEDIEAAALVESATGKISHLADTQATLEVINPDIPLSYLSL

SEQ ID NO: 991 - protein, 297 aa, synthetic construct
  REGION 1..297: note = Synthetic
MSWSPCFECAEQIVRFLATHHNLSLDIFSSRLYNVQDPETQQNLCRLVQEGAQVAAMDLYEFKKCWKKFVDNGGRRFRPWKRLLTNFRYQDSKLQEILRRMDPLSEEEFYSQFYNQRVKHLCYYHRMKPYLCYQLEQFNGQAPLKGCLLSEKGKQHAEILFLDKIRSMELSQVTITCYLTWSPCPNCAWQLAAFKRDRPDLILHIYTSRLYFHWKRPFQKGLCSLWQSGILVDVMDLPQFTDCWTNFVNPKRPFWPWKGLEIISRRTQRRLRRIKESWGLQDLVNDFGNLQLGPPMS

SEQ ID NO: 992 - protein, 301 aa, synthetic construct
  REGION 1..301: note = Synthetic
MDKPSFVIQSKEAESAAKQLGVSVIQLLPSLVKPAQSYARTPISKFNVAVVGLGSSGRIFLGVNVEFPNLPLHHSIHAEQFLVTNLTLNGERHLNFFAVSAAPCGHCRQFLQEIRDAPEIKILITDPNNSADSDSAADSDGFLRLGSFLPHRFGPDDLLGKDHPLLLESHDNHLKISDLDSICNGNTDSSADLKQTALAAANRSYAPYSLCPSGVSLVDCDGKVYRGWYMESAAYNPSMGPVQAALVDYVANGGGGGYERIVGAVLVEKEDAVVRQEHTARLLLETISPKCEFKVFHCYEA

SEQ ID NO: 993 - protein, 370 aa, synthetic construct
  REGION 1..370: note = Synthetic
MVEPMDPRTFVSNFNNRPILSGLNTVWLCCEVKTKDPSGPPLDAKIFQGKVYSKAKYHPEMRFLRWFHKWRQLHHDQEYKVTWYVSWSPCTRCANSVATFLAKDPKVTLTIFVARLYYFWKPDYQQALRILCQKRGGPHATMKIMNYNEFQDCWNKFVDGRGKPFKPRNNLPKHYTLLQATLGELLRHLMDPGTFTSNFNNKPWVSGQHETYLCYKVERLHNDTWVPLNQHRGFLRNQAPNIHGFPKGRHAELCFLDLIPFWKLDGQQYRVTCFTSWSPCFSCAQEMAKFISNNEHVSLCIFAARIYDDQGRYQEGLRALHRDGAKIAMMNYSEFEYCWDTFVDRQGRPFQPWDGLDEHSQALSGRLRAI

SEQ ID NO: 994 - protein, 373 aa, synthetic construct
  REGION 1..373: note = Synthetic
MKPHFRNTVERMYRDTFSYNFYNRPILSRRNTVWLCYEVKTKGPSRPRLDAKIFRGQVYSQPEHHAEMCFLSWFCGNQLPAYKCFQITWFVSWTPCPDCVAKLAEFLAEHPNVTLTISAARLYYYWERDYRRALCRLSQAGARVKIMDDEEFAYCWENFVYSEGQPFMPWYKFDDNYAFLHRTLKEILRNPMEAMYPHIFYFHFKNLRKAYGRNESWLCFTMEVVKHHSPVSWKRGVFRNQVDPETHCHAERCFLSWFCDDILSPNTNYEVTWYTSWSPCPECAGEVAEFLARHSNVNLTIFTARLYYFWDTDYQEGLRSLSQEGASVEIMGYKDFKYCWENFVYNDDEPFKPWKGLKYNFLFLDSKLQEILE

SEQ ID NO: 995 - protein, 377 aa, synthetic construct
  REGION 1..377: note = Synthetic
MNPQIRNMVEQMEPDIFVYYFNNRPILSGRNTVWLCYEVKTKDPSGPPLDANIFQGKLYPEAKDHPEMKFLHWFRKWRQLHRDQEYEVTWYVSWSPCTRCANSVATFLAEDPKVTLTIFVARLYYFWKPDYQQALRILCQERGGPHATMKIMNYNEFQHCWNEFVDGQGKPFKPRKNLPKHYTLLHATLGELLRHVMDPGTFTSNFNNKPWVSGQRETYLCYKVERSHNDTWVLLNQHRGFLRNQAPDRHGFPKGRHAELCFLDLIPFWKLDDQQYRVTCFTSWSPCFSCAQKMAKFISNNKHVSLCIFAARIYDDQGRCQEGLRTLHRDGAKIAVMNYSEFEYCWDTFVDRQGRPFQPWDGLDEHSQALSGRLRAI

SEQ ID NO: 996 - protein, 382 aa, synthetic construct
  REGION 1..382: note = Synthetic
MNPQIRNPMERMYRDTFYDNFENEPILYGRSYTWLCYEVKIKRGRSNLLWDTGVFRGQVYFKPQYHAEMCFLSWFCGNQLPAYKCFQITWFVSWTPCPDCVAKLAEFLSEHPNVTLTISAARLYYYWERDYRRALCRLSQAGARVTIMDYEEFAYCWENFVYNEGQQFMPWYKFDENYAFLHRTLKEILRYLMDPDTFTFNFNNDPLVLRRRQTYLCYEVERLDNGTWVLMDQHMGFLCNEAKNLLCGFYGRHAELRFLDLVPSLQLDPAQIYRVTWFISWSPCFSWGCAGEVRAFLQENTHVRLRIFAARIYDYDPLYKEALQMLRDAGAQVSIMTYDEFEYCWDTFVYRQGCPFQPWDGLEEHSQALSGRLRAILQNQGN

SEQ ID NO: 997 - protein, 383 aa, synthetic construct
  REGION 1..383: note = Synthetic
MKPQIRNMVEPMDPRTFVSNFNNRPILSGLDTVWLCCEVKTKDPSGPPLDAKIFQGKVYPKAKYHPEMRFLRWFHKWRQLHHDQEYKVTWYVSWSPCTRCANSVATFLAKDPKVTLTIFVARLYYFWKPDYQQALRILCQKRDGPHATMKIMNYNEFQDCWNKFVDGRGKPFKPWNNLPKHYTLLQATLGELLRHLMDPGTFTSNFNNKPWVSGQHETYLCYKVERLHNDTWVPLNQHRGFLRNQAPNIHGFPKGRHAELCFLDLIPFWKLDGQQYRVTCFTSWSPCFSCAQEMAKFISNNEHVSLCIFAARIYDDQGRYQEGLRTLHRDGAKIAMMNYSEFEYCWDTFVDRQGRPFQPWDGLDEHSQALSGRLRAILQNQGN

SEQ ID NO: 998 - protein, 384 aa, synthetic construct
  REGION 1..384: note = Synthetic
MKPHFRNTVERMYRDTFSYNFYNRPILSRRNTVWLCYEVKTKGPSRPPLDAKIFRGQVYSELKYHPEMRFFHWFSKWRKLHRDQEYEVTWYISWSPCTKCTRDMATFLAEDPKVTLTIFVARLYYFWDPDYQEALRSLCQKRDGPRATMKIMNYDEFQHCWSKFVYSQRELFEPWNNLPKYYILLHIMLGEILRHSMDPPTFTFNFNNEPWVRGRHETYLCYEVERMHNDTWVLLNQRRGFLCNQAPHKHGFLEGRHAELCFLDVIPFWKLDLDQDYRVTCFTSWSPCFSCAQEMAKFISKNKHVSLCIFTARIYDDQGRCQEGLRTLAEAGAKISIMTYSEFKHCWDTFVDHQGCPFQPWDGLDEHSQDLSGRLRAILQNQEN

SEQ ID NO: 999 - protein, 384 aa, synthetic construct
  REGION 1..384: note = Synthetic
MKPHFRNPVERMYQDTFSDNFYNRPILSHRNTVWLCYEVKTKGPSRPPLDAKIFRGQVYSKLKYHPEMRFFHWFSKWRKLHRDQEYEVTWYISWSPCTKCTRDVATFLAEDPKVTLTIFVARLYYFWDPDYQEALRSLCQKRDGPRATMKIMNYDEFQHCWSKFVYSQRELFEPWNNLPKYYILLHIMLGEILRHSMDPPTFTSNFNNELWVRGRHETYLCYEVERLHNDTWVLLNQRRGFLCNQAPHKHGFLEGRHAELCFLDVIPFWKLDLHQDYRVTCFTSWSPCFSCAQEMAKFISNNKHVSLCIFAARIYDDQGRCQEGLRTLAKAGAKISIMTYSEFKHCWDTFVDHQGCPFQPWDGLEEHSQALSGRLRAILQNQGN

SEQ ID NO: 1000 - protein, 386 aa, synthetic construct
  REGION 1..386: note = Synthetic
MNPQIRNPMERMYRDTFYDNFENEPILYGRSYTWLCYEVKIKRGRSNLLWDTGVFRGPVLPKRQSNHRQEVYFRFENHAEMCFLSWFCGNRLPANRRFQITWFVSWNPCLPCVVKVTKFLAEHPNVTLTISAARLYYYRDRDWRWVLLRLHKAGARVKIMDYEDFAYCWENFVCNEGQPFMPWYKFDDNYASLHRTLKEILRNPMEAMYPHIFYFHFKNLLKACGRNESWLCFTMEVTKHHSAVFRKRGVFRNQVDPETHCHAERCFLSWFCDDILSPNTNYEVTWYTSWSPCPECAGEVAEFLARHSNVNLTIFTARLCYFWDTDYQEGLCSLSQEGASVKIMGYKDFVSCWKNFVYSDDEPFKPWKGLQTNFRLLKRRLREILQ

SEQ ID NO: 1001 - protein, 392 aa, synthetic construct
  REGION 1..392: note = Synthetic
MQPQRLGPRAGMGPFCLGCSHRKCYSPIRNLISQETFKFHFKNLGYAKGRKDTFLCYEVTRKDCDSPVSLHHGVFKNKDNIHAEICFLYWFHDKVLKVLSPREEFKITWYMSWSPCFECAEQIVRFLATHHNLSLDIFSSRLYNVQDPETQQNLCRLVQEGAQVAAMDLYEFKKCWKKFVDNGGRRFRPWKRLLTNFRYQDSKLQEILRRMDPLSEEEFYSQFYNQRVKHLCYYHRMKPYLCYQLEQFNGQAPLKGCLLSEKGKQHAEILFLDKIRSMELSQVTITCYLTWSPCPNCAWQLAAFKRDRPDLILHIYTSRLYFHWKRPFQKGLCSLWQSGILVDVMDLPQFTDCWTNFVNPKRPFWPWKGLEIISRRTQRRLRRIKESRSHAS

SEQ ID NO: 1002 - protein, 407 aa, synthetic construct
  REGION 1..407: note = Synthetic
MQPQRLGPRAGMGPFCLGCSHRKCYSPIRNLISQETFKFHFKNLGYAKGRKDTFLCYEVTRKDCDSPVSLHHGVFKNKDNIHAEICFLYWFHDKVLKVLSPREEFKITWYMSWSPCFECAEQIVRFLATHHNLSLDIFSSRLYNVQDPETQQNLCRLVQEGAQVAAMDLYEFKKCWKKFVDNGGRRFRPWKRLLTNFRYQDSKLQEILRRMDPLSEEEFYSQFYNQRVKHLCYYHRMKPYLCYQLEQFNGQAPLKGCLLSEKGKQHAEILFLDKIRSMELSQVTITCYLTWSPCPNCAWQLAAFKRDRPDLILHIYTSRLYFHWKRPFQKGLCSLWQSGILVDVMDLPQFTDCWTNFVNPKRPFWPWKGLEIISRRTQRRLRRIKESWGLQDLVNDFGNLQLGPPMS

SEQ ID NO: 1003 - protein, 429 aa, synthetic construct
  REGION 1..429: note = Synthetic
MGPFCLGCSHRKCYSPIRNLISQETFKFHFKNLGYAKGRKDTFLCYEVTRKDCDSPVSLHHGVFKNKDNIHAEICFLYWFHDKVLKVLSPREEFKITWYMSWSPCFECAEQIVRFLATHHNLSLDIFSSRLYNVQDPETQQNLCRLVQEGAQVAAMDLYEFKKCWKKFVDNGGRRFRPWKRLLTNFRYQDSKLQEILRPCYISVPSSSSSTLSNICLTKGLPETRFWVEGRRMDPLSEEEFYSQFYNQRVKHLCYYHRMKPYLCYQLEQFNGQAPLKGCLLSEKGKQHAEILFLDKIRSMELSQVTITCYLTWSPCPNCAWQLAAFKRDRPDLILHIYTSRLYFHWKRPFQKGLCSLWQSGILVDVMDLPQFTDCWTNFVNPKRPFWPWKGLEIISRRTQRRLRRIKESWGLQDLVNDFGNLQLGPPMS

SEQ ID NO: 1004 - protein, 429 aa, synthetic construct
  REGION 1..429: note = Synthetic
MGPFCLGCSHRKCYSPIRNLISQETFKFHFKNLGYAKGRKDTFLCYEVTRKDCDSPVSLHHGVFKNKDNIHAEICFLYWFHDKVLKVLSPREEFKITWYMSWSPCFECAEQIVRFLATHHNLSLDIFSSRLYNVQDPETQQNLCRLVQEGAQVAAMDLYEFKKCWKKFVDNGGRRFRPWKRLLTNFRYQDSKLQEILRPCYIPVPSSSSSTLSNICLTKGLPETRFCVEGRRMDPLSEEEFYSQFYNQRVKHLCYYHRMKPYLCYQLEQFNGQAPLKGCLLSEKGKQHAEILFLDKIRSMELSQVTITCYLTWSPCPNCAWQLAAFKRDRPDLILHIYTSRLYFHWKRPFQKGLCSLWQSGILVDVMDLPQFTDCWTNFVNPKRPFWPWKGLEIISRRTQRRLRRIKESWGLQDLVNDFGNLQLGPPMS

SEQ ID NO: 1005 - protein, 430 aa, synthetic construct
  REGION 1..430: note = Synthetic
MQPQRLGPRAGMGPFCLGCSHRKCYSPIRNLISQETFKFHFKNLGYAKGRKDTFLCYEVTRKDCDSPVSLHHGVFKNKDNIHAEICFLYWFHDKVLKVLSPREEFKITWYMSWSPCFECAEQIVRFLATHHNLSLDIFSSRLYNVQDPETQQNLCRLVQEGAQVAAMDLYEFKKCWKKFVDNGGRRFRPWKRLLTNFRYQDSKLQEILRPCYISVPSSSSSTLSNICLTKGLPETRFWVEGRRMDPLSEEEFYSQFYNQRVKHLCYYHRMKPYLCYQLEQFNGQAPLKGCLLSEKGKQHAEILFLDKIRSMELSQVTITCYLTWSPCPNCAWQLAAFKRDRPDLILHIYTSRLYFHWKRPFQKGLCSLWQSGILVDVMDLPQFTDCWTNFVNPKRPFWPWKGLEIISRRTQRRLRRIKEVRTTLLQGPAS

SEQ ID NO: 1006 - protein, 440 aa, synthetic construct
  REGION 1..440: note = Synthetic
MQPQRLGPRAGMGPFCLGCSHRKCYSPIRNLISQETFKFHFKNLGYAKGRKDTFLCYEVTRKDCDSPVSLHHGVFKNKDNIHAEICFLYWFHDKVLKVLSPREEFKITWYMSWSPCFECAEQIVRFLATHHNLSLDIFSSRLYNVQDPETQQNLCRLVQEGAQVAAMDLYEFKKCWKKFVDNGGRRFRPWKRLLTNFRYQDSKLQEILRPCYISVPSSSSSTLSNICLTKGLPETRFWVEGRRMDPLSEEEFYSQFYNQRVKHLCYYHRMKPYLCYQLEQFNGQAPLKGCLLSEKGKQHAEILFLDKIRSMELSQVTITCYLTWSPCPNCAWQLAAFKRDRPDLILHIYTSRLYFHWKRPFQKGLCSLWQSGILVDVMDLPQFTDCWTNFVNPKRPFWPWKGLEIISRRTQRRLRRIKESWGLQDLVNDFGNLQLGPPMS

SEQ ID NO: 1007 - protein, 525 aa, synthetic construct
  REGION 1..525: note = Synthetic
MKETDQMQSLEGSGAERSVGTQTGSMTGQIPRLSKVNLFTLLSLWMELFPGVEAQGQKSQKTEEESRGPLGDNEELTRVSTEKKQVKKTGLVVVKNMKIIGLHCSSEDLHTGQIALIKHGSRLKNCDLYFSRKPCSACLKMIVNAGVNRISYWPSDPEISLLTEASSSEDAKLDAKAAERLKSNSRAHVCVLLQPLVCYMVQFVEETSYKCDFIQKTAKALPGADTDFYSECKQERIKEYEMLFLVSNEERHKQILMTIGLESLCEDPYFSNLRQNMKDLILLLATVASSVPNLKHFGFYCSSPEQINEIHNQSLPQEVARHCMVQARLLAYRTEDHKTGVGAVIWAEAKSRSCDGTGAMYFIGCGYNAFPVGSEYADFPHMDDKHKDREIRKFRYIIHAEQNALTFRCQDIKPEERSMIFVTKCPCDECVPLIKGAGIKQIYAGDVDVGKKKADISYMKFGELEGVRKFTWQLNPSEAYSLDPNEPERRENGVLRRRSAKDEQRSSKRPRLETRSAGSATTACF

SEQ ID NO: 1008 - protein, 427 aa, synthetic construct
  REGION 1..427: note = Synthetic
MSNNALQTIINARLPGEEGLWQIHLQDGKISAIDAQSGVMPITENSLDAEQGLVIPPFVEPHIHLDTTQTAGQPNWNQSGTLFEGIERWAERKALLTHDDVKQRAWQTLKWQIANGIQHVRTHVDVSDATLTALKAMLEVKQEVAPWIDLQIVAFPQEGILSYPNGEALLEEALRLGADVVGAIPHFEFTREYGVESLHKTFALAQKYDRLIDVHCDEIDDEQSRFVETVAALAHHEGMGARVTASHTTAMHSYNGAYTSRLFRLLKMSGINFVANPLVNIHLQGRFDTYPKRRGITRVKEMLESGINVCFGHDDVFDPWYPLGTANMLQVLHMGLHVCQLMGYGQINDGLNLITHHSARTLNLQDYGIAAGNSANLIILPAENGFDALRRQVPVRYSVRGGKVIASTQPAQTTVYLEQPEAIDYKR

SEQ ID NO: 1009 - protein, 210 aa, synthetic construct
  REGION 1..210: note = Synthetic
MALLTAKTFSLQFNNKRRVNKPYYPRKALLCYQLTPQNGSTPTRGHLKNKKKDHAEIRFINKIKSMGLDETQCYQVTCYLTWSPCPSCAGELVDFIKAHRHLNLRIFASRLYYHWRPNYQEGLLLLCGSQVPVEVMGLPEFTDCWENFVDHKEPPSFNPSEKLEELDKNSQAIKRRLERIKSRSVDVLENGLRSLQLGPVTPSSSIRNSR

SEQ ID NO: 1010 - protein, 428 aa, synthetic construct
  REGION 1..428: note = Synthetic
MEKDINLKIFKGNLIFTKTSDKFTIMKDSYIVVIDGKIASVSSNLPDKYKGNPIIDFRNNIIIPGMNDLHAHASQYKNLGIGMDKELLPWLNNYTFPEEAKFLNVDYAKKTYGRLIKDLIKNGTTRVALFATLHKDSTIELFNMLIKSGIGAYVGKVNMDYNCPDYLTENYITSLNDTEEIILKYKDKSNIVKPIITPRFVPSCSNELMDGLGKLSYKYRLPVQSHLSENLDEIAVVKSLHKKSNFYGEVYDKFGLFGNTPTLMAHCIHSSKEEINLIKRNNVTIVHCPTSNFNLGSGMMPVRKYLNLGINVVLGSDISAGHTCSLFKVIAYAIQNSKIKWQESGKKDMFLSTSEAFYMATKKGGSFFGKVGSFEEGYDFDALVINDSNLYPEDYDLTERLERFIYLGDDRNIMKRYVCGNEIFGPKF

SEQ ID NO: 1011 - protein, 412 aa, synthetic construct
  REGION 1..412: note = Synthetic
MKIINARLRRQEALFTLDLQDGIIHRITAQAAMQTADAGAIDAQGRLAIPPFVEPHIHLDATLTAGEPEWNRSGTLFEGITRWSQRKASITPEDTRQRALKTIGMLRDFGVQHVRTHVDVTDPSLAALQALLAVKQEAADLIDLQIVAFPQEGIESYPNGRELMTRAIEMGADVVGGIPHYENTRDKGVSSVMFLMDLAQRYGRLVDVHCDEIDDPQSRFLEVLAEEARVRGMGAQVTASHTCAMGSYDNAYCSKLFRLLKASGINFISCPTESIHLQGRFDSWPKRRGVTRVAELDRAGINVCFAQDSIQDPWYPLGNGNILRILDAGLHICHMLGYDDLQRCLDFVTDNSARALCLGDNYGLAEGRPANLLILDAENDYEAVRRQARVLTSIRHGKVILQREVEHIRYPA

SEQ ID NO: 1012 - protein, 812 aa, synthetic construct
  REGION 1..812: note = Synthetic
MGRKLDPTKEKRGPGRKARKQKGAETELVRFLPAVSDENSKRLSSRARKRAAKRRLGSVEAPKTNKSPEAKPLPGKLPKGISAGAVQTAGKKGPQSLFNAPRGKKRPAPGSDEEEEEEDSEEDGMVNHGDLWGSEDDADTVDDYGADSNSEDEEEGEALLPIERAARKQKAREAAAGIQWSEEETEDEEEEKEVTPESGPPKVEEADGGLQINVDEEPFVLPPAGEMEQDAQAPDLQRVHKRIQDIVGILRDFGAQREEGRSRSEYLNRLKKDLAIYYSYGDFLLGKLMDLFPLSELVEFLEANEVPRPVTLRTNTLKTRRRDLAQALINRGVNLDPLGKWSKTGLVVYDSSVPIGATPEYLAGHYMLQGASSMLPVMALAPQEHERILDMCCAPGGKTSYMAQLMKNTGVILANDANAERLKSVVGNLHRLGVTNTIISHYDGRQFPKVVGGFDRVLLDAPCSGTGVISKDPAVKTNKDEKDILRCAHLQKELLLSAIDSVNATSKTGGYLVYCTCSITVEENEWVVDYALKKRNVRLVPTGLDFGQEGFTRFRERRFHPSLRSTRRFYPHTHNMDGFFIAKFKKFSNSIPQSQTGNSETATPTNVDLPQVIPKSENSSQPAKKAKGAAKTKQQLQKQQHPKKASFQKLNGISKGADSELSTVPSVTKTQASSSFQDSSQPAGKAEGIREPKVTGKLKQRSPKLQSSKKVAFLRQNAPPKGTDTQTPAVLSPSKTQATLKPKDHHQPLGRAKGVEKQQLPEQPFEKAAFQKQNDTPKGPQPPTVSPIRSSRPPPAKRKKSQSRGNSQLLLS

SEQ ID NO: 1013 - protein, 767 aa, synthetic construct
  REGION 1..767: note = Synthetic
MGRRSRGRRLQQQQRPEDAEDGAEGGGKRGEAGWEGGYPEIVKENKLFEHYYQELKIVPEGEWGQFMDALREPLPATLRITGYKSHAKEILHCLKNKYFKELEDLEVDGQKVEVPQPLSWYPEELAWHTNLSRKILRKSPHLEKFHQFLVSETESGNISRQEAVSMIPPLLLNVRPHHKILDMCAAPGSKTTQLIEMLHADMNVPFPEGFVIANDVDNKRCYLLVHQAKRLSSPCIMVVNHDASSIPRLQIDVDGRKEILFYDRILCDVPCSGDGTMRKNIDVWKKWTTLNSLQLHGLQLRIATRGAEQLAEGGRMVYSTCSLNPIEDEAVIASLLEKSEGALELADVSNELPGLKWMPGITQWKVMTKDGQWFTDWDAVPHSRHTQIRPTMFPPKDPEKLQAMHLERCLRILPHHQNTGGFFVAVLVKKSSMPWNKRQPKLQGKSAETRESTQLSPADLTEGKPTDPSKLESPSFTGTGDTEIAHATEDLENNGSKKDGVCGPPPSKKMKLFGFKEDPFVFIPEDDPLFPPIEKFYALDPSFPRMNLLTRTTEGKKRQLYMVSKELRNVLLNNSEKMKVINTGIKVWCRNNSGEEFDCAFRLAQEGIYTLYPFINSRIITVSMEDVKILLTQENPFFRKLSSETYSQAKDLAKGSIVLKYEPDSANPDALQCPIVLCGWRGKASIRTFVPKNERLHYLRMMGLEVLGEKKKEGVILTNESAASTGQPDNDVTEGQRAGEPNSPDAEEANSPDVTAGCDPAGVHPPR

SEQ ID NO: 1014 - protein, 429 aa, synthetic construct; identical to SEQ ID NO: 1004
  REGION 1..429: note = Synthetic

SEQ ID NO: 1015 - protein, 429 aa, synthetic construct
  REGION 1..429: note = Synthetic
MGPFCLGCSHRKCYSPIRNLISQETFKFHFKNLRYAIDRKDTFLCYEVTRKDCDSPVSLHHGVFKNKDNIHAEICFLYWFHDKVLKVLSPREEFKITWYMSWSPCFECAEQVLRFLATHHNLSLDIFSSRLYNIRDPENQQNLCRLVQEGAQVAAMDLYEFKKCWKKFVDNGGRRFRPWKKLLTNFRYQDSKLQEILRPCYIPVPSSSSSTLSNICLTKGLPETRFCVERRRVHLLSEEEFYSQFYNQRVKHLCYYHGVKPYLCYQLEQFNGQAPLKGCLLSEKGKQHAEILFLDKIRSMELSQVIITCYLTWSPCPNCAWQLAAFKRDRPDLILHIYTSRLYFHWKRPFQKGLCSLWQSGILVDVMDLPQFTDCWTNFVNPKRPFWPWKGLEIISRRTQRRLHRIKESWGLQDLVNDFGNLQLGPPMS

SEQ ID NO: 1016 - protein, 370 aa, synthetic construct; identical to SEQ ID NO: 993
  REGION 1..370: note = Synthetic

SEQ ID NO: 1017 - protein, 384 aa, synthetic construct; identical to SEQ ID NO: 999
  REGION 1..384: note = Synthetic

SEQ ID NO: 1018 - protein, 377 aa, synthetic construct; identical to SEQ ID NO: 995
  REGION 1..377: note = Synthetic

SEQ ID NO: 1019 - protein, 384 aa, synthetic construct; identical to SEQ ID NO: 998
  REGION 1..384: note = Synthetic

SEQ ID NO: 1020 - protein, 373 aa, synthetic construct; identical to SEQ ID NO: 994
  REGION 1..373: note = Synthetic

SEQ ID NO: 1021 - protein, 382 aa, synthetic construct; identical to SEQ ID NO: 996
  REGION 1..382: note = Synthetic

SEQ ID NO: 1022 - protein, 386 aa, synthetic construct; identical to SEQ ID NO: 1000
  REGION 1..386: note = Synthetic

SEQ ID NO: 1023 - protein, 229 aa, synthetic construct [sequence omitted]

SEQ ID NO: 1024 - RNA, 100 nt, synthetic construct; identical to SEQ ID NO: 801
  misc_feature 1..100: note = Synthetic
  source 1..100: mol_type = other RNA

SEQ ID NO: 1025 - RNA, 100 nt, synthetic construct; identical to SEQ ID NO: 802
  misc_feature 1..100: note = Synthetic
  source 1..100: mol_type = other RNA

SEQ ID NO: 1026 - RNA, 100 nt, synthetic construct; identical to SEQ ID NO: 803
  misc_feature 1..100: note = Synthetic
  source 1..100: mol_type = other RNA

SEQ ID NO: 1027 - RNA, 100 nt, synthetic construct; identical to SEQ ID NO: 804
  misc_feature 1..100: note = Synthetic
  source 1..100: mol_type = other RNA

SEQ ID NO: 1028 - RNA, 100 nt, synthetic construct; identical to SEQ ID NO: 805
  misc_feature 1..100: note = Synthetic
  source 1..100: mol_type = other RNA

SEQ ID NO: 1029 - RNA, 100 nt, synthetic construct; identical to SEQ ID NO: 806
  misc_feature 1..100: note = Synthetic
  source 1..100: mol_type = other RNA

SEQ ID NO: 1030 - RNA, 100 nt, synthetic construct; identical to SEQ ID NO: 807
  misc_feature 1..100: note = Synthetic
  source 1..100: mol_type = other RNA

SEQ ID NO: 1031 - RNA, 100 nt, synthetic construct; identical to SEQ ID NO: 808
  misc_feature 1..100: note = Synthetic
  source 1..100: mol_type = other RNA

SEQ ID NO: 1032 - RNA, 100 nt, synthetic construct; identical to SEQ ID NO: 809
  misc_feature 1..100: note = Synthetic
  source 1..100: mol_type = other RNA

SEQ ID NO: 1033 - RNA, 100 nt, synthetic construct; identical to SEQ ID NO: 810
  misc_feature 1..100: note = Synthetic
  source 1..100: mol_type = other RNA

SEQ ID NO: 1034 - RNA, 100 nt, synthetic construct; identical to SEQ ID NO: 811
  misc_feature 1..100: note = Synthetic
  source 1..100: mol_type = other RNA

SEQ ID NO: 1035 - RNA, 100 nt, synthetic construct; identical to SEQ ID NO: 812
  misc_feature 1..100: note = Synthetic
  source 1..100: mol_type = other RNA

SEQ ID NO: 1036 - RNA, 100 nt, synthetic construct; identical to SEQ ID NO: 813
  misc_feature 1..100: note = Synthetic
  source 1..100: mol_type = other RNA

SEQ ID NO: 1037 - RNA, 100 nt, synthetic construct; identical to SEQ ID NO: 814
  misc_feature 1..100: note = Synthetic
  source 1..100: mol_type = other RNA

SEQ ID NO: 1038 - RNA, 100 nt, synthetic construct; identical to SEQ ID NO: 815
  misc_feature 1..100: note = Synthetic
  source 1..100: mol_type = other RNA

SEQ ID NO: 1039 - RNA, 100 nt, synthetic construct; identical to SEQ ID NO: 816
  misc_feature 1..100: note = Synthetic
  source 1..100: mol_type = other RNA

SEQ ID NO: 1040 - RNA, 100 nt, synthetic construct; identical to SEQ ID NO: 817
  misc_feature 1..100: note = Synthetic
  source 1..100: mol_type = other RNA

SEQ ID NO: 1041 - RNA, 100 nt, synthetic construct; identical to SEQ ID NO: 818
  misc_feature 1..100: note = Synthetic
  source 1..100: mol_type = other RNA

SEQ ID NO: 1042 - RNA, 100 nt, synthetic construct; identical to SEQ ID NO: 819
  misc_feature 1..100: note = Synthetic
  source 1..100: mol_type = other RNA

SEQ ID NO: 1043 - RNA, 100 nt, synthetic construct; identical to SEQ ID NO: 820
  misc_feature 1..100: note = Synthetic
  source 1..100: mol_type = other RNA

SEQ ID NO: 1044 - RNA, 100 nt, synthetic construct; identical to SEQ ID NO: 821
  misc_feature 1..100: note = Synthetic
  source 1..100: mol_type = other RNA

SEQ ID NO: 1045 - RNA, 100 nt, synthetic construct; identical to SEQ ID NO: 822
  misc_feature 1..100: note = Synthetic
  source 1..100: mol_type = other RNA

SEQ ID NO: 1046 - RNA, 100 nt, synthetic construct; identical to SEQ ID NO: 823
  misc_feature 1..100: note = Synthetic
  source 1..100: mol_type = other RNA

SEQ ID NO: 1047 - RNA, 100 nt, synthetic construct; identical to SEQ ID NO: 824
  misc_feature 1..100: note = Synthetic
  source 1..100: mol_type = other RNA

SEQ ID NO: 1048 - RNA, 100 nt, synthetic construct; identical to SEQ ID NO: 825
  misc_feature 1..100: note = Synthetic
  source 1..100: mol_type = other RNA

SEQ ID NO: 1049 - RNA, 100 nt, synthetic construct; identical to SEQ ID NO: 826
  misc_feature 1..100: note = Synthetic
  source 1..100: mol_type = other RNA

SEQ ID NO: 1050 - RNA, 100 nt, synthetic construct; identical to SEQ ID NO: 827
  misc_feature 1..100: note = Synthetic
  source 1..100: mol_type = other RNA

SEQ ID NO: 1051 - RNA, 100 nt, synthetic construct; identical to SEQ ID NO: 828
  misc_feature 1..100: note = Synthetic
  source 1..100: mol_type = other RNA

SEQ ID NO: 1052 - RNA, 100 nt, synthetic construct; identical to SEQ ID NO: 829
  misc_feature 1..100: note = Synthetic
  source 1..100: mol_type = other RNA

SEQ ID NO: 1053 - RNA, 100 nt, synthetic construct; identical to SEQ ID NO: 830
  misc_feature 1..100: note = Synthetic
  source 1..100: mol_type = other RNA

SEQ ID NO: 1054 - RNA, 100 nt, synthetic construct; identical to SEQ ID NO: 831
  misc_feature 1..100: note = Synthetic
  source 1..100: mol_type = other RNA

SEQ ID NO: 1055 - RNA, 100 nt, synthetic construct; identical to SEQ ID NO: 832
  misc_feature 1..100: note = Synthetic
  source 1..100: mol_type = other RNA

SEQ ID NO: 1056 - RNA, 100 nt, synthetic construct; identical to SEQ ID NO: 833
  misc_feature 1..100: note = Synthetic
  source 1..100: mol_type = other RNA

SEQ ID NO: 1057 - RNA, 100 nt, synthetic construct; identical to SEQ ID NO: 834
  misc_feature 1..100: note = Synthetic
  source 1..100: mol_type = other RNA

SEQ ID NO: 1058 - RNA, 100 nt, synthetic construct; identical to SEQ ID NO: 835
  misc_feature 1..100: note = Synthetic
  source 1..100: mol_type = other RNA

SEQ ID NO: 1059 - RNA, 100 nt, synthetic construct; identical to SEQ ID NO: 836
  misc_feature 1..100: note = Synthetic
  source 1..100: mol_type = other RNA

SEQ ID NO: 1060 - RNA, 100 nt, synthetic construct; identical to SEQ ID NO: 837
  misc_feature 1..100: note = Synthetic
  source 1..100: mol_type = other RNA

SEQ ID NO: 1061 - RNA, 100 nt, synthetic construct; identical to SEQ ID NO: 838
  misc_feature 1..100: note = Synthetic
  source 1..100: mol_type = other RNA

SEQ ID NO: 1062 - RNA, 100 nt, synthetic construct; identical to SEQ ID NO: 839
  misc_feature 1..100: note = Synthetic
  source 1..100: mol_type = other RNA

SEQ ID NO: 1063 - RNA, 100 nt, synthetic construct; identical to SEQ ID NO: 840
  misc_feature 1..100: note = Synthetic
  source 1..100: mol_type = other RNA

SEQ ID NO: 1064 - RNA, 100 nt, synthetic construct; identical to SEQ ID NO: 841
  misc_feature 1..100: note = Synthetic
  source 1..100: mol_type = other RNA

SEQ ID NO: 1065 - RNA, 100 nt, synthetic construct; identical to SEQ ID NO: 842
  misc_feature 1..100: note = Synthetic
  source 1..100: mol_type = other RNA

SEQ ID NO: 1066 - RNA, 100 nt, synthetic construct; identical to SEQ ID NO: 843
  misc_feature 1..100: note = Synthetic
  source 1..100: mol_type = other RNA

SEQ ID NO: 1067 - RNA, 100 nt, synthetic construct; identical to SEQ ID NO: 844
  misc_feature 1..100: note = Synthetic
  source 1..100: mol_type = other RNA

SEQ ID NO: 1068 - RNA, 100 nt, synthetic construct; identical to SEQ ID NO: 845
  misc_feature 1..100: note = Synthetic
  source 1..100: mol_type = other RNA

SEQ ID NO: 1069 - RNA, 100 nt, synthetic construct; identical to SEQ ID NO: 846
  misc_feature 1..100: note = Synthetic
  source 1..100: mol_type = other RNA

SEQ ID NO: 1070 - RNA, 100 nt, synthetic construct; identical to SEQ ID NO: 847
  misc_feature 1..100: note = Synthetic
  source 1..100: mol_type = other RNA

SEQ ID NO: 1071 - RNA, 100 nt, synthetic construct; identical to SEQ ID NO: 848
  misc_feature 1..100: note = Synthetic
  source 1..100: mol_type = other RNA

SEQ ID NO: 1072 - RNA, 100 nt, synthetic construct; identical to SEQ ID NO: 849
  misc_feature 1..100: note = Synthetic
  source 1..100: mol_type = other RNA

SEQ ID NO: 1073 - RNA, 100 nt, synthetic construct; identical to SEQ ID NO: 850
  misc_feature 1..100: note = Synthetic
  source 1..100: mol_type = other RNA

SEQ ID NO: 1074 - RNA, 100 nt, synthetic construct; identical to SEQ ID NO: 851
  misc_feature 1..100: note = Synthetic
  source 1..100: mol_type = other RNA

SEQ ID NO: 1075 - RNA, 100 nt, synthetic construct; identical to SEQ ID NO: 852
  misc_feature 1..100: note = Synthetic
  source 1..100: mol_type = other RNA

SEQ ID NO: 1076 - RNA, 100 nt, synthetic construct
  misc_feature 1..100: note = Synthetic
  modified_base 1..100: mod_base = OTHER; note = 2'-O-Me and PS modification may or may not be present
  source 1..100: mol_type = other RNA
tcctacctgtcagagccccagttttagagctagaaatagcaagttaaaataaggctagtccgttatcaacttgaaaaagtggcaccgagtcggtgctttt

SEQ ID NO: 1077 - RNA, 100 nt, synthetic construct
  misc_feature 1..100: note = Synthetic
  modified_base 1..100: mod_base = OTHER; note = 2'-O-Me and PS modification may or may not be present
  source 1..100: mol_type = other RNA
gagccccaaggtaaaaaggcgttttagagctagaaatagcaagttaaaataaggctagtccgttatcaacttgaaaaagtggcaccgagtcggtgctttt

SEQ ID NO: 1078 - RNA, 100 nt, synthetic construct
  misc_feature 1..100: note = Synthetic
  modified_base 1..100: mod_base = OTHER; note = 2'-O-Me and PS modification may or may not be present
  source 1..100: mol_type = other RNA
agccccaaggtaaaaaggccgttttagagctagaaatagcaagttaaaataaggctagtccgttatcaacttgaaaaagtggcaccgagtcggtgctttt

SEQ ID NO: 1079 - RNA, 100 nt, synthetic construct
  misc_feature 1..100: note = Synthetic
  modified_base 1..100: mod_base = OTHER; note = 2'-O-Me and PS modification may or may not be present
  source 1..100: mol_type = other RNA
tttcccggcctttttaccttgttttagagctagaaatagcaagttaaaataaggctagtccgttatcaacttgaaaaagtggcaccgagtcggtgctttt

SEQ ID NO: 1080 - RNA, 100 nt, synthetic construct
  misc_feature 1..100: note = Synthetic
  modified_base 1..100: mod_base = OTHER; note = 2'-O-Me and PS modification may or may not be present
  source 1..100: mol_type = other RNA
ctttcccggcctttttacctgttttagagctagaaatagcaagttaaaataaggctagtccgttatcaacttgaaaaagtggcaccgagtcggtgctttt

SEQ ID NO: 1081 - RNA, 100 nt, synthetic construct
  misc_feature 1..100: note = Synthetic
  modified_base 1..100: mod_base = OTHER; note = 2'-O-Me and PS modification may or may not be present
  source 1..100: mol_type = other RNA
acactgtgagctgcctgggagttttagagctagaaatagcaagttaaaataaggctagtccgttatcaacttgaaaaagtggcaccgagtcggtgctttt

SEQ ID NO: 1082 - RNA, 100 nt, synthetic construct
  misc_feature 1..100: note = Synthetic
  modified_base 1..100: mod_base = OTHER; note = 2'-O-Me and PS modification may or may not be present
  source 1..100: mol_type = other RNA
cacactgtgagctgcctggggttttagagctagaaatagcaagttaaaataaggctagtccgttatcaacttgaaaaagtggcaccgagtcggtgctttt

SEQ ID NO: 1083 - RNA, 100 nt, synthetic construct
  misc_feature 1..100: note = Synthetic
  modified_base 1..100: mod_base = OTHER; note = 2'-O-Me and PS modification may or may not be present
  source 1..100: mol_type = other RNA
gtggcacactgtgagctgccgttttagagctagaaatagcaagttaaaataaggctagtccgttatcaacttgaaaaagtggcaccgagtcggtgctttt

SEQ ID NO: 1084 - RNA, 100 nt, synthetic construct
  misc_feature 1..100: note = Synthetic
  modified_base 1..100: mod_base = OTHER; note = 2'-O-Me and PS modification may or may not be present
  source 1..100: mol_type = other RNA
gagattgagctctactcagggttttagagctagaaatagcaagttaaaataaggctagtccgttatcaacttgaaaaagtggcaccgagtcggtgctttt

SEQ ID NO: 1085 - RNA, 100 nt, synthetic construct
  misc_feature 1..100: note = Synthetic
  modified_base 1..100: mod_base = OTHER; note = 2'-O-Me and PS modification may or may not be present
  source 1..100: mol_type = other RNA
agattgagctctactcaggtgttttagagctagaaatagcaagttaaaataaggctagtccgttatcaacttgaaaaagtggcaccgagtcggtgctttt

SEQ ID NO: 1086 - RNA, 100 nt, synthetic construct
  misc_feature 1..100: note = Synthetic
  modified_base 1..100: mod_base = OTHER; note = 2'-O-Me and PS modification may or may not be present
  source 1..100: mol_type = other RNA
caggtgggccctcctccctcgttttagagctagaaatagcaagttaaaataaggctagtccgttatcaacttgaaaaagtggcaccgagtcggtgctttt

SEQ ID NO: 1087 - RNA, 100 nt, synthetic construct
  misc_feature 1..100: note = Synthetic
  modified_base 1..100: mod_base = OTHER; note = 2'-O-Me and PS modification may or may not be present
  source 1..100: mol_type = other RNA
cggaagagaccagagggagggttttagagctagaaatagcaagttaaaataaggctagtccgttatcaacttgaaaaagtggcaccgagtcggtgctttt

SEQ ID NO: 1088 - RNA, 100 nt, synthetic construct
  misc_feature 1..100: note = Synthetic
  modified_base 1..100: mod_base = OTHER; note = 2'-O-Me and PS modification may or may not be present
  source 1..100: mol_type = other RNA
taccggaagagaccagaggggttttagagctagaaatagcaagttaaaataaggctagtccgttatcaacttgaaaaagtggcaccgagtcggtgctttt

SEQ ID NO: 1089 - RNA, 100 nt, synthetic construct
  misc_feature 1..100: note = Synthetic
  modified_base 1..100: mod_base = OTHER; note = 2'-O-Me and PS modification may or may not be present
  source 1..100: mol_type = other RNA
agggaggcttatgccaatatgttttagagctagaaatagcaagttaaaataaggctagtccgttatcaacttgaaaaagtggcaccgagtcggtgctttt

SEQ ID NO: 1090 - RNA, 100 nt, synthetic construct
  misc_feature 1..100: note = Synthetic
  modified_base 1..100: mod_base = OTHER; note = 2'-O-Me and PS modification may or may not be present
  source 1..100: mol_type = other RNA
ggcttatgccaatatcggtggttttagagctagaaatagcaagttaaaataaggctagtccgttatcaacttgaaaaagtggcaccgagtcggtgctttt

SEQ ID NO: 1091 - RNA, 100 nt, synthetic construct
  misc_feature 1..100: note = Synthetic
  modified_base 1..100: mod_base = OTHER; note = 2'-O-Me and PS modification may or may not be present
  source 1..100: mol_type = other RNA
tgactgcgcttttccttgtcgttttagagctagaaatagcaagttaaaataaggctagtccgttatcaacttgaaaaagtggcaccgagtcggtgctttt

SEQ ID NO: 1092 - RNA, 100 nt, synthetic construct
  misc_feature 1..100: note = Synthetic
  modified_base 1..100: mod_base = OTHER; note = 2'-O-Me and PS modification may or may not be present
  source 1..100: mol_type = other RNA
gactgcgcttttccttgtctgttttagagctagaaatagcaagttaaaataaggctagtccgttatcaacttgaaaaagtggcaccgagtcggtgctttt

SEQ ID NO: 1093 - RNA, 100 nt, synthetic construct
  misc_feature 1..100: note = Synthetic
  modified_base 1..100: mod_base = OTHER; note = 2'-O-Me and PS modification may or may not be present
  source 1..100: mol_type = other RNA
gcttttccttgtctgggcaggttttagagctagaaatagcaagttaaaataaggctagtccgttatcaacttgaaaaagtggcaccgagtcggtgctttt

SEQ ID NO: 1094 - RNA, 100 nt, synthetic construct
  misc_feature 1..100: note = Synthetic
  modified_base 1..100: mod_base = OTHER; note = 2'-O-Me and PS modification may or may not be present
  source 1..100: mol_type = other RNA
ccagttccgctgcccagacagttttagagctagaaatagcaagttaaaataaggctagtccgttatcaacttgaaaaagtggcaccgagtcggtgctttt

SEQ ID NO: 1095 - RNA, 100 nt, synthetic construct
  misc_feature 1..100: note = Synthetic
  modified_base 1..100: mod_base = OTHER; note = 2'-O-Me and PS modification may or may not be present
  source 1..100: mol_type = other RNA
gacctgaagcactggaagccgttttagagctagaaatagcaagttaaaataaggctagtccgttatcaacttgaaaaagtggcaccgagtcggtgctttt

SEQ ID NO: 1096 - RNA, 100 nt, synthetic construct
  misc_feature 1..100: note = Synthetic
  modified_base 1..100: mod_base = OTHER; note = 2'-O-Me and PS modification may or may not be present
  source 1..100: mol_type = other RNA
gcactggaagccaggtgtgcgttttagagctagaaatagcaagttaaaataaggctagtccgttatcaacttgaaaaagtggcaccgagtcggtgctttt

SEQ ID NO: 1097 - RNA, 100 nt, synthetic construct
  misc_feature 1..100: note = Synthetic
  modified_base 1..100: mod_base = OTHER; note = 2'-O-Me and PS modification may or may not be present
  source 1..100: mol_type = other RNA
cactggaagccaggtgtgcagttttagagctagaaatagcaagttaaaataaggctagtccgttatcaacttgaaaaagtggcaccgagtcggtgctttt

SEQ ID NO: 1098 - RNA, 100 nt, synthetic construct
  misc_feature 1..100: note = Synthetic
  modified_base 1..100: mod_base = OTHER; note = 2'-O-Me and PS modification may or may not be present
  source 1..100: mol_type = other RNA
ggaagccaggtgtgcagggcgttttagagctagaaatagcaagttaaaataaggctagtccgttatcaacttgaaaaagtggcaccgagtcggtgctttt

SEQ ID NO: 1099 - RNA, 100 nt, synthetic construct
  misc_feature 1..100: note = Synthetic
  modified_base 1..100: mod_base = OTHER; note = 2'-O-Me and PS modification may or may not be present
  source 1..100: mol_type = other RNA
agccaggtgtgcagggcagggttttagagctagaaatagcaagttaaaataaggctagtccgttatcaacttgaaaaagtggcaccgagtcggtgctttt

SEQ ID NO: 1100 - RNA, 100 nt, synthetic construct
  misc_feature 1..100: note = Synthetic
  modified_base 1..100: mod_base = OTHER; note = 2'-O-Me and PS modification may or may not be present
  source 1..100: mol_type = other RNA
gcccacctgccctgcacaccgttttagagctagaaatagcaagttaaaataaggctagtccgttatcaacttgaaaaagtggcaccgagtcggtgctttt

SEQ ID NO: 1101 - RNA, 100 nt, synthetic construct
  misc_feature 1..100: note = Synthetic
  modified_base 1..100: mod_base = OTHER; note = 2'-O-Me and PS modification may or may not be present
  source 1..100: mol_type = other RNA
gggctcagctgtgaggaagtgttttagagctagaaatagcaagttaaaataaggctagtccgttatcaacttgaaaaagtggcaccgagtcggtgctttt

SEQ ID NO: 1102 - RNA, 100 nt, synthetic construct
  misc_feature 1..100: note = Synthetic
  modified_base 1..100: mod_base = OTHER; note = 2'-O-Me and PS modification may or may not be present
  source 1..100: mol_type = other RNA
ggggctcagctgtgaggaaggttttagagctagaaatagcaagttaaaataaggctagtccgttatcaacttgaaaaagtggcaccgagtcggtgctttt

SEQ ID NO: 1103 - RNA, 100 nt, synthetic construct
  misc_feature 1..100: note = Synthetic
  modified_base 1..100: mod_base = OTHER; note = 2'-O-Me and PS modification may or may not be present
  source 1..100: mol_type = other RNA
gaccagattcccagtatgttgttttagagctagaaatagcaagttaaaataaggctagtccgttatcaacttgaaaaagtggcaccgagtcggtgctttt

SEQ ID NO: 1104 - RNA, 100 nt, synthetic construct
  misc_feature 1..100: note = Synthetic
  modified_base 1..100: mod_base = OTHER; note = 2'-O-Me and PS modification may or may not be present
  source 1..100: mol_type = other RNA
ccagattcccagtatgttaggttttagagctagaaatagcaagttaaaataaggctagtccgttatcaacttgaaaaagtggcaccgagtcggtgctttt

SEQ ID NO: 1105 - RNA, 100 nt, synthetic construct
  misc_feature 1..100: note = Synthetic
  modified_base 1..100: mod_base = OTHER; note = 2'-O-Me and PS modification may or may not be present
  source 1..100: mol_type = other RNA
cagattcccagtatgttagggttttagagctagaaatagcaagttaaaataaggctagtccgttatcaacttgaaaaagtggcaccgagtcggtgctttt

SEQ ID NO: 1106 - RNA, 100 nt, synthetic construct
  misc_feature 1..100: note = Synthetic
  modified_base 1..100: mod_base = OTHER; note = 2'-O-Me and PS modification may or may not be present
  source 1..100: mol_type = other RNA
tcccagtatgttagggggctgttttagagctagaaatagcaagttaaaataaggctagtccgttatcaacttgaaaaagtggcaccgagtcggtgctttt

SEQ ID NO: 1107 - RNA, 100 nt, synthetic construct
  misc_feature 1..100: note = Synthetic
  modified_base 1..100: mod_base = OTHER; note = 2'-O-Me and PS modification may or may not be present
  source 1..100: mol_type = other RNA
tccaagccccctaacatactgttttagagctagaaatagcaagttaaaataaggctagtccgttatcaacttgaaaaagtggcaccgagtcggtgctttt

SEQ ID NO: 1108 - RNA, 100 nt, synthetic construct
  misc_feature 1..100: note = Synthetic
  modified_base 1..100: mod_base = OTHER; note = 2'-O-Me and PS modification may or may not be present
  source 1..100: mol_type = other RNA
ctccaagccccctaacatacgttttagagctagaaatagcaagttaaaataaggctagtccgttatcaacttgaaaaagtggcaccgagtcggtgctttt

SEQ ID NO: 1109 - RNA, 100 nt, synthetic construct
  misc_feature 1..100: note = Synthetic
  modified_base 1..100: mod_base = OTHER; note = 2'-O-Me and PS modification may or may not be present
  source 1..100: mol_type = other RNA
aaaggcactgcaagagacaagttttagagctagaaatagcaagttaaaataaggctagtccgttatcaacttgaaaaagtggcaccgagtcggtgctttt

SEQ ID NO: 1110 - RNA, 100 nt, synthetic construct
  misc_feature 1..100: note = Synthetic
  modified_base 1..100: mod_base = OTHER; note = 2'-O-Me and PS modification may or may not be present
  source 1..100: mol_type = other RNA
tccagtatattcatctaccagttttagagctagaaatagcaagttaaaataaggctagtccgttatcaacttgaaaaagtggcaccgagtcggtgctttt

SEQ ID NO: 1111 - RNA, 100 nt, synthetic construct
  misc_feature 1..100: note = Synthetic
  modified_base 1..100: mod_base = OTHER; note = 2'-O-Me and PS modification may or may not be present
  source 1..100: mol_type = other RNA
ttcatctaccatggtgagtggttttagagctagaaatagcaagttaaaataaggctagtccgttatcaacttgaaaaagtggcaccgagtcggtgctttt

SEQ ID NO: 1112 - RNA, 100 nt, synthetic construct
  misc_feature 1..100: note = Synthetic
  modified_base 1..100: mod_base = OTHER; note = 2'-O-Me and PS modification may or may not be present
  source 1..100: mol_type = other RNA
tcatctaccatggtgagtgcgttttagagctagaaatagcaagttaaaataaggctagtccgttatcaacttgaaaaagtggcaccgagtcggtgctttt

SEQ ID NO: 1113 - RNA, 100 nt, synthetic construct
  misc_feature 1..100: note = Synthetic
  modified_base 1..100: mod_base = OTHER; note = 2'-O-Me and PS modification may or may not be present
  source 1..100: mol_type = other RNA
catctaccatggtgagtgcggttttagagctagaaatagcaagttaaaataaggctagtccgttatcaacttgaaaaagtggcaccgagtcggtgctttt

SEQ ID NO: 1114 - RNA, 100 nt, synthetic construct
  misc_feature 1..100: note = Synthetic
  modified_base 1..100: mod_base = OTHER; note = 2'-O-Me and PS modification may or may not be present
  source 1..100: mol_type = other RNA
accatggtgagtgcggggccgttttagagctagaaatagcaagttaaaataaggctagtccgttatcaacttgaaaaagtggcaccgagtcggtgctttt

SEQ ID NO: 1115 - RNA, 100 nt, synthetic construct
  misc_feature 1..100: note = Synthetic
  modified_base 1..100: mod_base = OTHER; note = 2'-O-Me and PS modification may or may not be present
  source 1..100: mol_type = other RNA
gccaggccccgcactcaccagttttagagctagaaatagcaagttaaaataaggctagtccgttatcaacttgaaaaagtggcaccgagtcggtgctttt

SEQ ID NO: 1116 - RNA, 100 nt, synthetic construct
  misc_feature 1..100: note = Synthetic
  modified_base 1..100: mod_base = OTHER; note = 2'-O-Me and PS modification may or may not be present
  source 1..100: mol_type = other RNA
ccactctccacccccaatgtgttttagagctagaaatagcaagttaaaataaggctagtccgttatcaacttgaaaaagtggcaccgagtcggtgctttt

SEQ ID NO: 1117 - RNA, 100 nt, synthetic construct
  misc_feature 1..100: note = Synthetic
  modified_base 1..100: mod_base = OTHER; note = 2'-O-Me and PS modification may or may not be present
  source 1..100: mol_type = other RNA
ctccacccccaatgtaggtggttttagagctagaaatagcaagttaaaataaggctagtccgttatcaacttgaaaaagtggcaccgagtcggtgctttt

SEQ ID NO: 1118 - RNA, 100 nt, synthetic construct
  misc_feature 1..100: note = Synthetic
  modified_base 1..100: mod_base = OTHER; note = 2'-O-Me and PS modification may or may not be present
  source 1..100: mol_type = other RNA
cacctcacctacattggggggttttagagctagaaatagcaagttaaaataaggctagtccgttatcaacttgaaaaagtggcaccgagtcggtgctttt

SEQ ID NO: 1119 - RNA, 100 nt, synthetic construct
  misc_feature 1..100: note = Synthetic
  modified_base 1..100: mod_base = OTHER; note = 2'-O-Me and PS modification may or may not be present
  source 1..100: mol_type = other RNA
gggcacctcacctacattgggttttagagctagaaatagcaagttaaaataaggctagtccgttatcaacttgaaaaagtggcaccgagtcggtgctttt

SEQ ID NO: 1120 - RNA, 100 nt, synthetic construct
  misc_feature 1..100: note = Synthetic
  modified_base 1..100: mod_base = OTHER; note = 2'-O-Me and PS modification may or may not be present
  source 1..100: mol_type = other RNA
tggggcacctcacctacattgttttagagctagaaatagcaagttaaaataaggctagtccgttatcaacttgaaaaagtggcaccgagtcggtgctttt

SEQ ID NO: 1121 - RNA, 100 nt, synthetic construct
  misc_feature 1..100: note = Synthetic
  modified_base 1..100: mod_base = OTHER; note = 2'-O-Me and PS modification may or may not be present
  source 1..100: mol_type = other RNA
ctggggcacctcacctacatgttttagagctagaaatagcaagttaaaataaggctagtccgttatcaacttgaaaaagtggcaccgagtcggtgctttt

SEQ ID NO: 1122 - RNA, 100 nt, synthetic construct
  misc_feature 1..100: note = Synthetic
  modified_base 1..100: mod_base = OTHER; note = 2'-O-Me and PS modification may or may not be present
  source 1..100: mol_type = other RNA
acctcccgagcaaacatgacgttttagagctagaaatagcaagttaaaataaggctagtccgttatcaacttgaaaaagtggcaccgagtcggtgctttt

SEQ ID NO: 1123 - RNA, 100 nt, synthetic construct
  misc_feature 1..100: note = Synthetic
  modified_base 1..100: mod_base = OTHER; note = 2'-O-Me and PS modification may or may not be present
  source 1..100: mol_type = other RNA
ccgagcaaacatgacaggtagttttagagctagaaatagcaagttaaaataaggctagtccgttatcaacttgaaaaagtggcaccgagtcggtgctttt

SEQ ID NO: 1124 - RNA, 100 nt, synthetic construct
  misc_feature 1..100: note = Synthetic
  modified_base 1..100: mod_base = OTHER; note = 2'-O-Me and PS modification may or may not be present
  source 1..100: mol_type = other RNA
gtacctctcacaggccctaagttttagagctagaaatagcaagttaaaataaggctagtccgttatcaacttgaaaaagtggcaccgagtcggtgctttt

SEQ ID NO: 1125 - RNA, 100 nt, synthetic construct
  misc_feature 1..100: note = Synthetic
  modified_base 1..100: mod_base = OTHER; note = 2'-O-Me and PS modification may or may not be present
  source 1..100: mol_type = other RNA
agtacctctcacaggccctagttttagagctagaaatagcaagttaaaataaggctagtccgttatcaacttgaaaaagtggcaccgagtcggtgctttt

SEQ ID NO: 1126 - RNA, 100 nt, synthetic construct
  misc_feature 1..100: note = Synthetic
  modified_base 1..100: mod_base = OTHER; note = 2'-O-Me and PS modification may or may not be present
  source 1..100: mol_type = other RNA
gacgtcttgtgctctggagagttttagagctagaaatagcaagttaaaataaggctagtccgttatcaacttgaaaaagtggcaccgagtcggtgctttt

SEQ ID NO: 1127 - RNA, 100 nt, synthetic construct
  misc_feature 1..100: note = Synthetic
  modified_base 1..100: mod_base = OTHER; note = 2'-O-Me and PS modification may or may not be present
  source 1..100: mol_type = other RNA
aacaagcttccaaaatggccgttttagagctagaaatagcaagttaaaataaggctagtccgttatcaacttgaaaaagtggcaccgagtcggtgctttt

SEQ ID NO: 1128 - RNA, 100 nt, synthetic construct
  misc_feature 1..100: note = Synthetic
  modified_base 1..100: mod_base = OTHER; note = 2'-O-Me and PS modification may or may not be present
  source 1..100: mol_type = other RNA
gagatcccgcatcactcaccgttttagagctagaaatagcaagttaaaataaggctagtccgttatcaacttgaaaaagtggcaccgagtcggtgctttt

SEQ ID NO: 1129 - RNA, 100 nt, synthetic construct
  misc_feature 1..100: note = Synthetic
  modified_base 1..100: mod_base = OTHER; note = 2'-O-Me and PS modification may or may not be present
  source 1..100: mol_type = other RNA
gcccctggcctttgcagagcgttttagagctagaaatagcaagttaaaataaggctagtccgttatcaacttgaaaaagtggcaccgagtcggtgctttt

SEQ ID NO: 1130 - RNA, 100 nt, synthetic construct
  misc_feature 1..100: note = Synthetic
  modified_base 1..100: mod_base = OTHER; note = 2'-O-Me and PS modification may or may not be present
  source 1..100: mol_type = other RNA
tcagctgtgtcacccgtttcgttttagagctagaaatagcaagttaaaataaggctagtccgttatcaacttgaaaaagtggcaccgagtcggtgctttt

SEQ ID NO: 1131 - RNA, 100 nt, synthetic construct
  misc_feature 1..100: note = Synthetic
  modified_base 1..100: mod_base = OTHER; note = 2'-O-Me and PS modification may or may not be present
  source 1..100: mol_type = other RNA
gctgtgtcacccgtttcagggttttagagctagaaatagcaagttaaaataaggctagtccgttatcaacttgaaaaagtggcaccgagtcggtgctttt

SEQ ID NO: 1132 - RNA, 100 nt, synthetic construct
  misc_feature 1..100: note = Synthetic
  modified_base 1..100: mod_base = OTHER; note = 2'-O-Me and PS modification may or may not be present
  source 1..100: mol_type = other RNA
cacccgtttcaggtggggtggttttagagctagaaatagcaagttaaaataaggctagtccgttatcaacttgaaaaagtggcaccgagtcggtgctttt

SEQ ID NO: 1133 - RNA, 100 nt, synthetic construct
  misc_feature 1..100: note = Synthetic
  modified_base 1..100: mod_base = OTHER; note = 2'-O-Me and PS modification may or may not be present
  source 1..100: mol_type = other RNA
gtctgaggccctccctccacgttttagagctagaaatagcaagttaaaataaggctagtccgttatcaacttgaaaaagtggcaccgagtcggtgctttt

SEQ ID NO: 1134 - RNA, 100 nt, synthetic construct
  misc_feature 1..100: note = Synthetic
  modified_base 1..100: mod_base = OTHER; note = 2'-O-Me and PS modification may or may not be present
  source 1..100: mol_type = other RNA
tctgaggccctccctccacagttttagagctagaaatagcaagttaaaataaggctagtccgttatcaacttgaaaaagtggcaccgagtcggtgctttt

SEQ ID NO: 1135 - RNA, 100 nt, synthetic construct
  misc_feature 1..100: note = Synthetic
  modified_base 1..100: mod_base = OTHER; note = 2'-O-Me and PS modification may or may not be present
  source 1..100: mol_type = other RNA
caaggcagccctgtggaggggttttagagctagaaatagcaagttaaaataaggctagtccgttatcaacttgaaaaagtggcaccgagtcggtgctttt

SEQ ID NO: 1136 - RNA, 100 nt, synthetic construct
  misc_feature 1..100: note = Synthetic
  modified_base 1..100: mod_base = OTHER; note = 2'-O-Me and PS modification may or may not be present
  source 1..100: mol_type = other RNA
gctcaaggcagccctgtggagttttagagctagaaatagcaagttaaaataaggctagtccgttatcaacttgaaaaagtggcaccgagtcggtgctttt

SEQ ID NO: 1137 - RNA, 100 nt, synthetic construct
  misc_feature 1..100: note = Synthetic
  modified_base 1..100: mod_base = OTHER; note = 2'-O-Me and PS modification may or may not be present
  source 1..100: mol_type = other RNA
cgctcaaggcagccctgtgggttttagagctagaaatagcaagttaaaataaggctagtccgttatcaacttgaaaaagtggcaccgagtcggtgctttt

SEQ ID NO: 1138 - RNA, 100 nt, synthetic construct
  misc_feature 1..100: note = Synthetic
  modified_base 1..100: mod_base = OTHER; note = 2'-O-Me and PS modification may or may not be present
  source 1..100: mol_type = other RNA
taacattgcctgttctctccgttttagagctagaaatagcaagttaaaataaggctagtccgttatcaacttgaaaaagtggcaccgagtcggtgctttt

SEQ ID NO: 1139 - RNA, 100 nt, synthetic construct
  misc_feature 1..100: note = Synthetic
  modified_base 1..100: mod_base = OTHER; note = 2'-O-Me and PS modification may or may not be present
  source 1..100: mol_type = other RNA
cttctcgtcctggagagaacgttttagagctagaaatagcaagttaaaataaggctagtccgttatcaacttgaaaaagtggcaccgagtcggtgctttt

SEQ ID NO: 1140 - RNA, 100 nt, synthetic construct
  misc_feature 1..100: note = Synthetic
  modified_base 1..100: mod_base = OTHER; note = 2'-O-Me and PS modification may or may not be present
  source 1..100: mol_type = other RNA
ttccgaggaacttctcgtccgttttagagctagaaatagcaagttaaaataaggctagtccgttatcaacttgaaaaagtggcaccgagtcggtgctttt

SEQ ID NO: 1141 - RNA, 100 nt, synthetic construct
  misc_feature 1..100: note = Synthetic
  modified_base 1..100: mod_base = OTHER; note = 2'-O-Me and PS modification may or may not be present
  source 1..100: mol_type = other RNA
acccttgctctttgcctcctgttttagagctagaaatagcaagttaaaataaggctagtccgttatcaacttgaaaaagtggcaccgagtcggtgctttt

SEQ ID NO: 1142 - RNA, 100 nt, synthetic construct
  misc_feature 1..100: note = Synthetic
  modified_base 1..100: mod_base = OTHER; note = 2'-O-Me and PS modification may or may not be present
  source 1..100: mol_type = other RNA
ttgctctttgcctcctaggcgttttagagctagaaatagcaagttaaaataaggctagtccgttatcaacttgaaaaagtggcaccgagtcggtgctttt

SEQ ID NO: 1143 - RNA, 100 nt, synthetic construct
  misc_feature 1..100: note = Synthetic
  modified_base 1..100: mod_base = OTHER; note = 2'-O-Me and PS modification may or may not be present
  source 1..100: mol_type = other RNA
tgctctttgcctcctaggctgttttagagctagaaatagcaagttaaaataaggctagtccgttatcaacttgaaaaagtggcaccgagtcggtgctttt

SEQ ID NO: 1144 - RNA, 100 nt, synthetic construct
  misc_feature 1..100: note = Synthetic
  modified_base 1..100: mod_base = OTHER; note = 2'-O-Me and PS modification may or may not be present
  source 1..100: mol_type = other RNA
cctgagacagggcccagcctgttttagagctagaaatagcaagttaaaataaggctagtccgttatcaacttgaaaaagtggcaccgagtcggtgctttt

SEQ ID NO: 1145 - RNA, 100 nt, synthetic construct
  misc_feature 1..100: note = Synthetic
  modified_base 1..100: mod_base = OTHER; note = 2'-O-Me and PS modification may or may not be present
  source 1..100: mol_type = other RNA
atctgattccacctgcagccgttttagagctagaaatagcaagttaaaataaggctagtccgttatcaacttgaaaaagtggcaccgagtcggtgctttt

SEQ ID NO: 1146 - RNA, 100 nt, synthetic construct
  misc_feature 1..100: note = Synthetic
  modified_base 1..100: mod_base = OTHER; note = 2'-O-Me and PS modification may or may not be present
  source 1..100: mol_type = other RNA
actcagcgcatccaggctgcgttttagagctagaaatagcaagttaaaataaggctagtccgttatcaacttgaaaaagtggcaccgagtcggtgctttt

SEQ ID NO: 1147 - RNA, 100 nt, synthetic construct
  misc_feature 1..100: note = Synthetic
  modified_base 1..100: mod_base = OTHER; note = 2'-O-Me and PS modification may or may not be present
  source 1..100: mol_type = other RNA
aaaccctcaagtgagtgagcgttttagagctagaaatagcaagttaaaataaggctagtccgttatcaacttgaaaaagtggcaccgagtcggtgctttt

SEQ ID NO: 1148 - RNA, 100 nt, synthetic construct
  misc_feature 1..100: note = Synthetic
  modified_base 1..100: mod_base = OTHER; note = 2'-O-Me and PS modification may or may not be present
  source 1..100: mol_type = other RNA
aaccctcaagtgagtgagctgttttagagctagaaatagcaagttaaaataaggctagtccgttatcaacttgaaaaagtggcaccgagtcggtgctttt

SEQ ID NO: 1149 - RNA, 100 nt, synthetic construct
  misc_feature 1..100: note = Synthetic
  modified_base 1..100: mod_base = OTHER; note = 2'-O-Me and PS modification may or may not be present
  source 1..100: mol_type = other RNA
ggcccagctcactcacttgagttttagagctagaaatagcaagttaaaataaggctagtccgttatcaacttgaaaaagtggcaccgagtcggtgctttt

SEQ ID NO: 1150 - RNA, 100 nt, synthetic construct
  misc_feature 1..100: note = Synthetic
  modified_base 1..100: mod_base = OTHER; note = 2'-O-Me and PS modification may or may not be present
  source 1..100: mol_type = other RNA
aggcccagctcactcacttggttttagagctagaaatagcaagttaaaataaggctagtccgttatcaacttgaaaaagtggcaccgagtcggtgctttt

SEQ ID NO: 1151 - RNA, 100 nt, synthetic construct
  misc_feature 1..100: note = Synthetic
  modified_base 1..100: mod_base = OTHER; note = 2'-O-Me and PS modification may or may not be present
  source 1..100: mol_type = other RNA
cagactgcggggacacagtggttttagagctagaaatagcaagttaaaataaggctagtccgttatcaacttgaaaaagtggcaccgagtcggtgctttt

SEQ ID NO: 1152 - RNA, 100 nt, synthetic construct
  misc_feature 1..100: note = Synthetic
  modified_base 1..100: mod_base = OTHER; note = 2'-O-Me and PS modification may or may not be present
  source 1..100: mol_type = other RNA
ctgcatccctgctcaggctagttttagagctagaaatagcaagttaaaataaggctagtccgttatcaacttgaaaaagtggcaccgagtcggtgctttt

SEQ ID NO: 1153 - RNA, 100 nt, synthetic construct
  misc_feature 1..100: note = Synthetic
  modified_base 1..100: mod_base = OTHER; note = 2'-O-Me and PS modification may or may not be present
  source 1..100: mol_type = other RNA
cctgctcaggctaaggtgaggttttagagctagaaatagcaagttaaaataaggctagtccgttatcaacttgaaaaagtggcaccgagtcggtgctttt

SEQ ID NO: 1154 - RNA, 100 nt, synthetic construct
  misc_feature 1..100: note = Synthetic
  modified_base 1..100: mod_base = OTHER; note = 2'-O-Me and PS modification may or may not be present
  source 1..100: mol_type = other RNA
ctgctcaggctaaggtgagtgttttagagctagaaatagcaagttaaaataaggctagtccgttatcaacttgaaaaagtggcaccgagtcggtgctttt

SEQ ID NO: 1155 - RNA, 100 nt, synthetic construct
  misc_feature 1..100: note = Synthetic
  modified_base 1..100: mod_base = OTHER; note = 2'-O-Me and PS modification may or may not be present
  source 1..100: mol_type = other RNA
cagcacctgaccggtatccggttttagagctagaaatagcaagttaaaataaggctagtccgttatcaacttgaaaaagtggcaccgagtcggtgctttt

SEQ ID NO: 1156 - RNA, 100 nt, synthetic construct
  misc_feature 1..100: note = Synthetic
  modified_base 1..100: mod_base = OTHER; note = 2'-O-Me and PS modification may or may not be present
  source 1..100: mol_type = other RNA
gtacaagctgtcggaaacaggttttagagctagaaatagcaagttaaaataaggctagtccgttatcaacttgaaaaagtggcaccgagtcggtgctttt

SEQ ID NO: 1157 - RNA, 100 nt, synthetic construct
  misc_feature 1..100: note = Synthetic
  modified_base 1..100: mod_base = OTHER; note = 2'-O-Me and PS modification may or may not be present
  source 1..100: mol_type = other RNA
ggagacgctggcgtaagtccgttttagagctagaaatagcaagttaaaataaggctagtccgttatcaacttgaaaaagtggcaccgagtcggtgctttt

SEQ ID NO: 1158 - RNA, 100 nt, synthetic construct
  misc_feature 1..100: note = Synthetic
  modified_base 1..100: mod_base = OTHER; note = 2'-O-Me and PS modification may or may not be present
  source 1..100: mol_type = other RNA
ggcgtaagtccaggcaacccgttttagagctagaaatagcaagttaaaataaggctagtccgttatcaacttgaaaaagtggcaccgagtcggtgctttt

SEQ ID NO: 1159 - RNA, 100 nt, synthetic construct
  misc_feature 1..100: note = Synthetic
  modified_base 1..100: mod_base = OTHER; note = 2'-O-Me and PS modification may or may not be present
  source 1..100: mol_type = other RNA
ctccacccaccagggttgccgttttagagctagaaatagcaagttaaaataaggctagtccgttatcaacttgaaaaagtggcaccgagtcggtgctttt

SEQ ID NO: 1160 - RNA, 100 nt, synthetic construct
  misc_feature 1..100: note = Synthetic
  modified_base 1..100: mod_base = OTHER; note = 2'-O-Me and PS modification may or may not be present
  source 1..100: mol_type = other RNA
tgagtcccatccccccttgcgttttagagctagaaatagcaagttaaaataaggctagtccgttatcaacttgaaaaagtggcaccgagtcggtgctttt

SEQ ID NO: 1161 - RNA, 100 nt, synthetic construct
  misc_feature 1..100: note = Synthetic
  modified_base 1..100: mod_base = OTHER; note = 2'-O-Me and PS modification may or may not be present
  source 1..100: mol_type = other RNA
ccacatcctgcaaggggggagttttagagctagaaatagcaagttaaaataaggctagtccgttatcaacttgaaaaagtggcaccgagtcggtgctttt

SEQ ID NO: 1162 - RNA, 100 nt, synthetic construct
  misc_feature 1..100: note = Synthetic
  modified_base 1..100: mod_base = OTHER; note = 2'-O-Me and PS modification may or may not be present
  source 1..100: mol_type = other RNA
gggcgtccacatcctgcaaggttttagagctagaaatagcaagttaaaataaggctagtccgttatcaacttgaaaaagtggcaccgagtcggtgctttt

SEQ ID NO: 1163 - RNA, 100 nt, synthetic construct
  misc_feature 1..100: note = Synthetic
  modified_base 1..100: mod_base = OTHER; note = 2'-O-Me and PS modification may or may not be present
  source 1..100: mol_type = other RNA
gtgggcgtccacatcctgcagttttagagctagaaatagcaagttaaaataaggctagtccgttatcaacttgaaaaagtggcaccgagtcggtgctttt

We claim:

1. A composition comprising a first mRNA comprising a first open reading frame encoding a polypeptide comprising a cytidine deaminase and an RNA-guided nickase, and a second mRNA comprising a second open reading frame encoding a uracil glycosylase inhibitor (UGI), wherein the second mRNA is different from the first mRNA, optionally wherein the composition comprises lipid nanoparticles.

2. The composition of claim 1, wherein the first open reading frame does not comprise a sequence encoding a UGI.

3. The composition of claim 1 or 2, wherein the composition comprises a first composition and a second composition, wherein the first composition comprises a first mRNA comprising a first open reading frame encoding a polypeptide comprising a cytidine deaminase and an RNA-guided nickase and does not comprise a uracil glycosylase inhibitor (UGI), and the second composition comprises a second mRNA comprising a second open reading frame encoding a uracil glycosylase inhibitor (UGI), wherein the second mRNA is different from the first mRNA, optionally wherein the compositions comprise lipid nanoparticles.

4. The composition of any one of claims 1-3, wherein the first mRNA and the second mRNAs are in the same or separate vials.

5. A method of modifying a target gene comprising delivering to a cell a first mRNA comprising a first open reading frame encoding a first polypeptide comprising a cytidine deaminase and an RNA-guided nickase, a second mRNA comprising a second open reading frame encoding a uracil glycosylase inhibitor (UGI), wherein the second mRNA is different from the first mRNA, and at least one guide RNA (gRNA).

6. The method of claim 5, wherein if the nickase is a SpyCas9 nickase, then the gRNA is a SpyCas9 gRNA, and if the nickase is a NmeCas9 nickase, then the gRNA is a Nme gRNA.

7. The method of claim 5 or 6, wherein the first open reading frame does not comprise a sequence encoding a UGI.

8. The composition or method of any one of claims 1-7, wherein the molar ratio of the second mRNA to the first mRNA is from 1:1 to 30:1.

9. The composition or method of any one of claims 1-7, wherein the molar ratio is from 2:1 to 30:1.

10. The composition or method of any one of claims 1-7, wherein the molar ratio is from 7:1 to 22:1.

11. An mRNA comprising an open reading frame encoding a polypeptide comprising a cytidine deaminase and an RNA-guided nickase, wherein the polypeptide does not comprise a uracil glycosylase inhibitor (UGI).

12. A method of modifying at least one cytidine within a target gene in a cell, comprising expressing in the cell or contacting the cell with: (i) a first polypeptide comprising a cytidine deaminase and an RNA-guided nickase, wherein the first polypeptide does not comprise a uracil glycosylase inhibitor (UGI); (ii) a UGI polypeptide; and (iii) at least one guide RNA (gRNA) wherein the first polypeptide and gRNA form a complex with the target gene and modify the at least one cytidine in the target gene.

13. The method of claim 12, wherein if the nickase is a SpyCas9 nickase, then the gRNA is a SpyCas9 gRNA, and if the nickase is a NmeCas9 nickase, then the gRNA is a Nme gRNA.

14. The method of claim 12 or 13, wherein the ratio of the UGI polypeptide to the first polypeptide is from 10:1 to 50:1.

15. A cell, wherein the mRNA or composition of any one of claims 1-4 and 8-11 has been introduced to the cell, wherein the cell has been modified after the introduction.

16. An engineered cell altered by the method of claims 5-10 and 12-14.

17. An engineered cell comprising at least one base edit and/or indel, wherein the base edit and/or indel is made by contacting a cell with a composition comprising a first mRNA comprising a first open reading frame encoding a polypeptide comprising a cytidine deaminase and an RNA-guided nickase, and a second mRNA comprising a second open reading frame encoding a uracil glycosylase inhibitor (UGI), wherein the second mRNA is different from the first mRNA.

18. The engineered cell of claim 17, wherein the first open reading frame does not comprise a sequence encoding a UGI.

19. The mRNA, composition, method, cell, or engineered cell of any one of claims 1-18, wherein the cytidine deaminase is
(i) an enzyme of APOBEC family, optionally an enzyme of APOBEC3 subgroup;
(ii) a cytidine deaminase comprising an amino acid sequence that is at least 80% identical to any one of SEQ ID NOs: 40, 41, and 960-1023;
(iii) a cytidine deaminase comprising an amino acid sequence that is at least 80% identical to any one of SEQ ID NOs: 40, 41, and 960-1013;
(iv) a cytidine deaminase comprising an amino acid sequence that is at least 80% identical to any one of SEQ ID NOs: 40, 41, 976, 977, 979, 980, 984-987, 993-1006, and 1009; or
(v) a cytidine deaminase comprising an amino acid sequence that is at least 80% identical to any one of SEQ ID NOs: 40, 976, 981, 984, 986, and 1014-1023.

20. The mRNA, composition, method, cell, or engineered cell of claim 19, wherein the cytidine deaminase comprises an amino acid sequence with at least 80%, 85%, 87%, 90%, 95%, 98%, 99%, or 100% identity to SEQ ID NO: 40, 41, and 960-1023.

21. The mRNA, composition, method, cell, or engineered cell of claim 19, wherein the cytidine deaminase comprises an amino acid sequence with at least 80%, 85%, 87%, 90%, 95%, 98%, 99%, or 100% identity to SEQ ID NO: 40, 41, and 960-1013.

22. The mRNA, composition, method, cell, or engineered cell of claim 19, wherein the cytidine deaminase comprises an amino acid sequence with at least 80%, 85%, 87%, 90%, 95%, 98%, 99%, or 100% identity to SEQ ID NO: 40, 41, 976, 977, 979, 980, 984-987, 993-1006, and 1009.

23. The mRNA, composition, method, cell, or engineered cell of claim 19, wherein the cytidine deaminase comprises an amino acid sequence with at least 80%, 85%, 87%, 90%, 95%, 98%, 99%, or 100% identity to SEQ ID NO: 40, 976, 981, 984, 986, 1014-1023.

24. The mRNA, composition, method, cell, or engineered cell of any one of claims 1-23, wherein the cytidine deaminase is an APOBEC3A deaminase (A3A).

25. The mRNA, composition, method, cell, or engineered cell of claim 24, wherein the A3A comprises an amino acid sequence of SEQ ID NO: 40 or an amino acid sequence with at least 87%, at least 90%, at least 95%, at least 98%, at least 99% identity to SEQ ID NO: 40.

26. The mRNA, composition, method, cell, or engineered cell of any one of claims 24-25, wherein the A3A is a human A3A.

27. The mRNA, composition, method, cell, or engineered cell of any one of claims 24-26, wherein the A3A is a wild-type A3A.

28. The mRNA, composition, method, cell, or engineered cell of claim 24, wherein the A3A comprises an amino acid sequence with at least 87%, 90%, 95%, 98%, 99%, or 100% identity to SEQ ID NO: 976, 977, 993-1006, and 1009.

29. The composition, method, cell, or engineered cell of any one of claims 1-28, wherein the UGI comprises an amino acid sequence of SEQ ID NO: 27 or an amino acid sequence with at least 80%, at least 90%, at least 95%, at least 98%, at least 99% identity to SEQ ID NO: 27.

30. The composition, method, or cell of any one of claims 1-4, 8-10, and 15-29, further comprising at least one guide RNA (gRNA).

31. The composition, method, cell, or engineered cell of any one of claims 1-4, 8-10, and 15-30, comprising a gRNA, wherein the gRNA is an sgRNA.

32. The composition, method, cell, or engineered cell of any one of claims 1-4, 8-10, and 15-31, comprising a gRNA, wherein the gRNA is a short-single guide RNA (short-sgRNA) comprising a conserved portion of an sgRNA comprising a hairpin region, wherein the hairpin region lacks at least 5-10 nucleotides and wherein the short-sgRNA comprises a 5′ end modification or a 3′ end modification or both.

33. The mRNA, composition, method, cell, or engineered cell of any one of claims 1-32, wherein the RNA-guided nickase is a Cas9 nickase.

34. The mRNA, composition, method, cell, or engineered cell of any one of claims 1-33, wherein the RNA-guided nickase is an S. pyogenes (Spy) Cas9 nickase.

35. The mRNA, composition, method, cell, or engineered cell of claim 34, wherein the RNA-guided nickase is a D10A SpyCas9 nickase.

36. The mRNA, composition, method, cell, or engineered cell of any one of claims 1-35, wherein the RNA-guided nickase comprises an amino acid sequence of any one of SEQ ID NOs: 70, 73, or 76 or an amino acid sequence having at least 80%, 90%, 95%, 98%, or 99% identity to any one of SEQ ID NOs: 70, 73, or 76.

37. The mRNA, composition, method, cell, or engineered cell of any one of claims 1-36, wherein the sequence encoding the RNA-guided nickase comprises a nucleotide sequence of any one of SEQ ID NOs: 72, 75, or 78 or a nucleotide sequence having at least 80%, 90%, 95%, 98%, or 99% identity to the nucleotide sequence of any one of SEQ ID NOs: 72, 75, or 78.

38. The mRNA, composition, method, cell, or engineered cell of any one of claims 1-37, wherein the sequence encoding the RNA-guided nickase comprises the nucleotide sequence of any one of SEQ ID NOs: 71, 72, 74, 75, or 77-90.

39. The mRNA, composition, method, cell, or engineered cell of any one of claims 1-33, wherein the RNA-guided nickase is a N. meningitidis (Nme) Cas9 nickase.

40. The mRNA, composition, method, cell, or engineered cell of claim 39, wherein the RNA-guided nickase is a D16A NmeCas9 nickase, optionally a D16A Nme2Cas9.

41. The mRNA, composition, method, cell, or engineered cell of any one of claims 1-33, 39, or 40, wherein the sequence encoding the RNA-guided nickase comprises the nucleotide sequence of any one of SEQ ID NOs: 380 and 387.

42. The mRNA, composition, method, cell, or engineered cell of any one of claims 1-41, wherein the mRNA comprises a 5′ UTR with at least 90% identity to any one of SEQ ID NOs: 91-98.

43. The mRNA, composition, method, cell, or engineered cell of any one of claims 1-42, wherein the mRNA comprises a 3′ UTR with at least 90% identity to any one of SEQ ID NOs: 99-106.

44. The mRNA, composition, method, cell, or engineered cell of any one of claims 1-43, wherein the mRNA further comprises a 5′ cap selected from Cap0, Cap1, Cap2, and a cap added co-transcriptionally or post-transcriptionally, optionally wherein the co-transcriptionally added cap is selected from anti-reverse cap analog (ARCA), AG (m7G(5′)ppp(5′)(2′OMeA)pG, or GG (m7G(5′)ppp(5′)(2′OMeG)pG, a cap added post-transcriptionally.

45. The mRNA, composition, method, cell, or engineered cell of any one of claims 1-44, wherein the mRNA further comprises a poly-adenylated (poly-A) tail, optionally wherein the poly-A tail is added to the mRNA by PCR tailing or enzymatic tailing and optionally wherein the poly-A tail comprises a sequence of SEQ ID NO: 109.

46. The mRNA, composition, method, cell, or engineered cell of any one of claims 1-45, wherein the open reading frame encoding a polypeptide comprising a cytidine deaminase and an RNA-guided nickase, and/or the open reading frame encoding a uracil glycosylase inhibitor (UGI) comprise (i) minimal adenine codons and/or minimal uridine codons; (ii) minimal adenine codons; (iii) codons that increase translation of the mRNA in a mammal; or (iv) codons that increase translation of the mRNA in a mammal, wherein the mammal is a human.

47. The mRNA, composition, method, cell, or engineered cell of any one of claims 1-46, wherein the cytidine deaminase is located N-terminal to the RNA-guided nickase in the polypeptide.

48. The mRNA, composition, method, cell, or engineered cell of any one of claims 1-47, wherein the encoded RNA-guided nickase comprises a nuclear localization signal (NLS).

49. The mRNA, composition, method, cell, or engineered cell of any one of claims 1-48, wherein the encoded RNA-guided nickase comprises a nuclear localization signal (NLS), and wherein the NLS is at the C-terminus of the RNA-guided nickase.

50. The mRNA, composition, method, cell, or engineered cell of any one of claims 1-49, wherein the encoded RNA-guided nickase comprises a nuclear localization signal (NLS), and wherein the NLS is at the N-terminus of the RNA-guided nickase, or wherein an NLS is fused to both the N-terminus and C-terminus of the RNA-guided nickase.

51. The mRNA, composition, method, cell, or engineered cell of any one of claims 1-50, wherein the encoded RNA-guided nickase comprises a nuclear localization signal (NLS), and wherein a linker is present between the N-terminus of the RNA-guided nickase and the NLS, optionally wherein the linker is a peptide linker.

52. The mRNA, composition, method, cell, or engineered cell of any one of claims 1-51, wherein the encoded RNA-guided nickase comprises a nuclear localization signal (NLS), and wherein the NLS comprises a sequence having at least 80%, 85%, 90%, or 95% identity to any one of SEQ ID NOs: 63 and 110-122.

53. The mRNA, composition, method, cell, or engineered cell of any one of claims 1-52, wherein the encoded RNA-guided nickase comprises a nuclear localization signal (NLS), and wherein the NLS comprises the sequence of any one of SEQ ID NOs: 63 and 110-122.

54. The mRNA, composition, method, cell, or engineered cell of any one of claims 1-53, wherein the encoded RNA-guided nickase comprises a nuclear localization signal (NLS), and wherein the NLS is encoded by a sequence having at least 80%, 85%, 90%, 95%, 98% or 100% identity to the sequence of any one of SEQ ID NOs: 123-135.

55. The mRNA, composition, method, cell, or engineered cell of any one of claims 1-54, wherein the encoded RNA-guided nickase comprises a nuclear localization signal (NLS), and wherein the cytidine deaminase is located N-terminal to the NLS in the polypeptide.

56. The mRNA, composition, method, cell, or engineered cell of any one of claims 1-55, wherein the encoded RNA-guided nickase comprises a nuclear localization signal (NLS), and wherein the RNA-guided nickase is located N-terminal to the NLS in the polypeptide.

57. The mRNA, composition, method, cell, or engineered cell of any one of claims 1-56, wherein the open reading frame encoding a polypeptide comprising a cytidine deaminase and an RNA-guided nickase comprises a sequence having at least 80%, 85%, 90%, 95%, 98% or 100% identity to the sequence of SEQ ID NO:1.

58. The mRNA, composition, method, cell, or engineered cell of any one of claims 1-57, wherein the open reading frame encoding a polypeptide comprising a cytidine deaminase and an RNA-guided nickase comprises a sequence having at least 80%, 85%, 90%, 95%, 98% or 100% identity to the sequence of SEQ ID NO: 4.

59. The mRNA, composition, method, cell, or engineered cell of any one of claims 1-58, wherein the open reading frame encoding a polypeptide comprising a cytidine deaminase and an RNA-guided nickase comprises a sequence having at least 80%, 85%, 90%, 95%, 98%, 99% or 100% identity to the sequence of SEQ ID NO: 321.

60. The mRNA, composition, method, cell, or engineered cell of any one of claims 1-59, wherein the open reading frame encoding a polypeptide comprising a cytidine deaminase and an RNA-guided nickase comprises a sequence having at least 80%, 85%, 90%, 95%, 98%, 99% or 100% identity to the sequence of SEQ ID NO: 313.

61. The mRNA, composition, method, cell, or engineered cell of any one of claims 1-60, wherein at least 10% of the uridine in the mRNA is substituted with a modified uridine.

62. The mRNA, composition, method, cell or engineered cell of claim 61, wherein the modified uridine is one or more of N1-methyl-pseudouridine, pseudouridine, 5-methoxyuridine, or 5-iodouridine.

63. The mRNA, composition, method, cell, or engineered cell of any one of claims 61-62, wherein 15% to 45% of the uridine is substituted with the modified uridine.

64. The mRNA, composition, method, cell, or engineered cell of any one of claims 61-63, wherein at least 20% or at least 30%, at least 80% or at least 90%, or 100% of the uridine is substituted with the modified uridine.

65. The mRNA, composition, method, or cell of any one of the preceding claims 61-64, further encoding a peptide linker between the cytidine deaminase and RNA-guided nickase, optionally wherein the peptide linker is XTEN or the peptide linker comprises a sequence of GTKDSTKDIPETPSKD (SEQ ID NO: 268).

66. The mRNA, composition, method, or cell of any one of claims 61-65, further encoding a peptide linker between the cytidine deaminase and RNA-guided nickase, wherein the peptide linker comprises at least 1, at least 2, at least 3, at least 4, at least 5, at least 6, at least 7, at least 8, at least 9, at least 10, at least 15, at least 20, at least 25, at least 30, at least 40, at least 50, or more amino acids.

67. The mRNA, composition, method, or cell of any one of claims 61-66, further encoding a peptide linker between the cytidine deaminase and RNA-guided nickase, wherein the peptide linker comprises one or more sequences selected from SEQ ID NOs: 46-59, 61 and 211-272.

68. A polypeptide encoded by any one of the mRNAs of any one of claims 1-28 and 33-67.

69. A ribonucleoprotein complex (RNP) comprising (i) a polypeptide encoded by any one of the mRNAs of any one of claims 1-28 and 33-67; and (ii) a guide RNA.

70. A vector comprising any one of the mRNAs of any one of claims 1-28 and 33-67.

71. An expression construct comprising a promoter operably linked to a sequence encoding any one of the mRNAs of any one of claims 1-28, 33-60, and 65-67.

72. A plasmid comprising the expression construct of claim 71.

73. A host cell comprising the vector of claim 70, the expression construct of claim 71, or the plasmid of claim 72.

74. The mRNA or composition of any one of claims 1-4, 8-11, and 19-67, wherein the mRNA or composition is formulated as a lipid nucleic acid assembly composition, optionally a lipid nanoparticle.

75. Use of the mRNA or composition according to any one of claims 1-4, 8-11, and 19-67 for modifying a target gene in a cell.

76. Use of the mRNA or composition according to any one of claims 1-4, 8-11, and 19-67 for the manufacture of a medicament for modifying a target gene in a cell.

77. A method of modifying a target gene in a cell, comprising delivering to the cell one or more lipid nucleic acid assembly compositions, optionally lipid nanoparticles, comprising:
(a) a first mRNA comprising a first open reading frame encoding a polypeptide comprising a cytidine deaminase and an RNA-guided nickase;
(b) a second mRNA comprising a second open reading frame encoding a uracil glycosylase inhibitor (UGI); and
(c) one or more guide RNAs.

78. The method of claim 77, wherein parts (a), (b), and (c) are each in separate lipid nucleic acid assembly compositions.

79. The method of claim 77, wherein parts (a), (b), and (c) are in the same lipid nucleic acid assembly composition.

80. The method of any one of claims 77-79, wherein the one or more guide RNAs are each in separate lipid nucleic acid assembly compositions.

81. The method of any one of claims 77-80, comprising delivering to the cell a lipid nucleic acid assembly composition comprising a first mRNA comprising a first open reading frame encoding a polypeptide comprising a cytidine deaminase and an RNA-guided nickase and a second mRNA comprising a second open reading frame encoding a uracil glycosylase inhibitor (UGI) in the same lipid nucleic acid assembly composition.

82. The method of any one of claims 77-81, comprising delivering to the cell a first lipid nucleic acid assembly composition comprising a first mRNA comprising a first open reading frame encoding a polypeptide comprising a cytidine deaminase and an RNA-guided nickase, and a second lipid nucleic acid assembly composition comprising a second mRNA comprising a second open reading frame encoding a uracil glycosylase inhibitor (UGI).

83. The method of any one of claims 77-82, further comprising delivering one or more guide RNAs in one or more lipid nucleic acid assembly compositions that are separate from the lipid nucleic acid assembly compositions comprising the cytidine deaminase and UGI.

84. The method of claims any one of claims 77-83, wherein at least 2, 3, 4, 5, 6, 7, 8, 9, or 10 lipid nucleic acid assembly compositions are delivered to the cell.

85. The method of any one of claims 77-84, wherein at least one lipid nucleic acid assembly composition comprises lipid nanoparticle (LNPs), optionally wherein all lipid nucleic acid assembly compositions comprise LNPs.

86. The method of any one of claims 77-85, wherein at least one lipid nucleic acid assembly composition is a lipoplex composition.

87. The method of any one of claims 77-86, wherein the lipid nucleic acid assembly composition comprises an ionizable lipid.

88. The method of any one of claims 77-87, wherein the lipid nucleic acid assembly composition comprises an ionizable lipid and wherein the ionizable lipid has a pKa in the range of from about 5.1 to about 7.4, such as from about 5.5 to about 6.6, from about 5.6 to about 6.4, from about 5.8 to about 6.2, or from about 5.8 to about 6.5.

89. The method of any one of claims 77-88, wherein the lipid nucleic acid assembly composition comprises (i) an amine lipid; (ii) a helper lipid; (iii) a stealth lipid; (iv) a neutral lipid; or combinations of one or more of (i)-(iv).

90. The method of claim 89, wherein (i) the amine lipid is Lipid A; (ii) the helper lipid is cholesterol; (iii) the stealth lipid is PEG2k-DMG; (iv) the neutral lipid is DSPC; or combinations of one or more of (i)-(iv).

91. The method of any one of claims 77-90, wherein the N/P ratio of the lipid nucleic acid assembly composition is about 6.

92. The method of any one of claims 77-91, wherein the lipid nucleic acid assembly composition comprises about 50 mol-% amine lipid such as Lipid A; about 9 mol-% neutral lipid such as DSPC; about 3 mol-% of stealth lipid such as a PEG lipid, such as PEG2k-DMG, and the remainder of the lipid component is helper lipid such as cholesterol wherein the N/P ratio of the is about 6.

93. The method of any one of claims 77-92, wherein the lipid nucleic acid assembly composition comprises about 35 mol-% amine lipid such as Lipid A; about 15 mol-% neutral lipid such as DSPC; about 2.5 mol-% of stealth lipid such as a PEG lipid, such as PEG2k-DMG, and the remainder of the lipid component is helper lipid such as cholesterol wherein the N/P ratio of the is about 6.

94. The method of any one of claims 77-93, comprising one gRNA that targets a gene that reduces or eliminates MHC class I expression on the surface of a cell, and/or one gRNA that targets a gene that reduces or eliminates MHC class II expression on the surface of a cell, and/or one gRNA that targets a gene that reduces or eliminates endogenous TCR expression.

95. The method of any one of claims 77-94, comprising at least two gRNAs selected from: one gRNA that targets a gene that reduces or eliminates MHC class I expression on the surface of a cell, one gRNA that targets a gene that reduces or eliminates MHC class II expression on the surface of a cell, and one gRNA that targets a gene that reduces or eliminates endogenous TCR expression.

96. The method of any one of claims 77-95, comprising one gRNA that targets a gene that reduces or eliminates MHC class I expression on the surface of a cell, one gRNA that targets a gene that reduces or eliminates MHC class II expression on the surface of a cell, and one gRNA that targets a gene that reduces or eliminates endogenous TCR expression.

97. The method of any one of claims 77-96, comprising one gRNA selected from a gRNA that targets TRAC, TRBC, B2M, HLA-A, or CIITA.

98. The method of any one of claims 77-97, wherein the gRNA targets TRBC, wherein the gRNA comprises a guide sequence chosen from: i) SEQ ID NOs: 706-721; ii) at least 17, 18, 19, or 20 contiguous nucleotides of a sequence selected from SEQ ID NOs: 706-721; iii) a guide sequence at least 95%, 90%, or 85% identical to a sequence selected from SEQ ID NOs: 706-721; iv) a sequence that comprises 10 contiguous nucleotides±10 nucleotides of a genomic coordinate listed in Table 5A; v) at least 17, 18, 19, or 20 contiguous nucleotides of a sequence from (iv); or vi) a guide sequence that is at least 95%, 90%, or 85% identical to a sequence selected from (v).

99. The method of any one of claims 77-97, wherein the gRNA targets TRBC, wherein the gRNA comprises a guide sequence chosen from: i) SEQ ID NOs: 618-669; ii) at least 17, 18, 19, or 20 contiguous nucleotides of a sequence selected from SEQ ID NOs: 618-669; iii) a guide sequence at least 95%, 90%, or 85% identical to a sequence selected from SEQ ID NOs: 618-669; iv) a sequence that comprises 10 contiguous nucleotides±10 nucleotides of a genomic coordinate listed in Table 5B; v) at least 17, 18, 19, or 20 contiguous nucleotides of a sequence from (iv); or vi) a guide sequence that is at least 95%, 90%, or 85% identical to a sequence selected from (v).

100. The method of any one of claims 77-97, comprising at least two gRNAs selected from a gRNA that targets TRAC, TRBC, or B2M, wherein the two guide RNAs do not target the same gene.

101. The method of any one of claims 77-97, comprising at least two gRNAs selected from a gRNA that targets TRAC, TRBC, or HLA-A, wherein the two guide RNAs do not target the same gene.

102. The method of any one of claims 77-97, comprising one guide RNA that targets TRAC, and one gRNA that targets TRBC.

103. The method of any one of claims 77-97, comprising one guide RNA that targets B2M, and one gRNA that targets CIITA.

104. The method of any one of claims 77-97, comprising one guide RNA that targets HLA-A, and one gRNA that targets CIITA, optionally wherein the cell is homozygous for HLA-B and homozygous for HLA-C.

105. The method of any one of claims 77-97, comprising one guide RNA that targets TRAC, and one gRNA that targets TRBC, and one gRNA that targets B2M.

106. The method of any one of claims 77-97, comprising one guide RNA that targets TRAC, and one gRNA that targets TRBC, and one gRNA that targets HLA-A, optionally wherein the cell is homozygous for HLA-B and homozygous for HLA-C.

107. The method of any one of claims 77-97, comprising one guide RNA that targets TRAC, and one gRNA that targets TRBC, one gRNA that targets B2M, and one gRNA that targets CIITA.

108. The method of any one of claims 77-97, comprising one guide RNA that targets TRAC, and one gRNA that targets TRBC, one gRNA that targets HLA-A, and one gRNA that targets CIITA, optionally wherein the cell is homozygous for HLA-B and homozygous for HLA-C.

109. The method of any one of claims 5-10, 12-14, 19-67, and 77-108, wherein the method generates a cytosine (C) to thymine (T) conversion when present within a target sequence, optionally wherein if the nickase is a SpyCas9 nickase, the C to T conversion comprises 1-12 C to T conversions, and if the nickase is a NmeCas9 nickase, the C to T conversion comprises 1-20 C to T conversions.

110. The method of any one of claims 5-10, 12-14, 19-67, and 77-109, wherein the method causes at least 60% C-to-T conversion relative to the total edits in the target sequence.

111. The method of any one of claims 5-10, 12-14, 19-67, and 77-110, wherein the method causes at least 65%, 70%, 75%, 80%, 85%, 90%, 95%, 98%, or 99% C-to-T conversion relative to the total edits in the target sequence.

112. The method of any one of claims 5-10, 12-14, 19-67, and 77-111, wherein the ratio of C-to-T conversion to unintended edits is larger than 1:1.

113. The method of any one of claims 5-10, 12-14, 19-67, and 77-112, wherein the ratio of C-to-T conversion to unintended edits is from 2:1 to 99:1.

114. The method of any one of claims 5-10, 12-14, 19-67, and 77-113, wherein the ratio of C-to-T conversion to unintended edits is 2:1, 3:1, 4:1, 5:1, 6:1, 7:1, or 8:1.

115. The method of any one of claims 5-10, 12-14, 19-67, and 77-114, wherein the method causes the cytidine deaminase to make a base edit corresponding to any one of positions −1 to 10 relative to the 5′ end of the guide sequence.

116. The method of any one of claims 5-10, 12-14, 19-67, and 77-115, wherein the method causes the cytidine deaminase to make a base edit at a cytidine present at position 1, 2, 3, 4, 5, 6, 7, 8, 9, or 10 nucleotides from the 5′ end of the guide sequence.

117. The method of any one of claims 5-10, 12-14, 19-67, and 77-116, wherein the nickase is a SpyCas9 nickase, and the method causes the cytidine deaminase to make a base edit at a cytidine present at position 1, 2, 3, 4, 5, 6, 7, 8, 9, 10, or 11 nucleotides from the 5′ end of the guide sequence.

118. The method of any one of claims 5-10, 12-14, 19-67, and 77-116, wherein the nickase is a NmeCas9 nickase, and the method causes the cytidine deaminase to make a base edit at a cytidine present at position 4, 5, 6, 7, 8, 9, 10, 11, 12, 13, 14, 15, 16, 17, 18, 19, or 20 nucleotides from the 5′ end of the guide sequence.

119. The method of any one of claims 5-10, 12-14, 19-67, and 77-118, wherein the first mRNA, the second mRNA, and the guide RNA if present, delivered at a ratio of about 6:2:3 (w:w:w).

120. The method, cell, or engineered cell of any one of claims 5-10, 12-67, and 77-119, wherein the cell is a lymphocyte.

121. The method or use of any one of claims 5-10, 12-14, 19-67, and 75-120, wherein the modification of the target gene is in vivo.

122. The method or use of any one of claims 5-10, 12-14, 19-67, and 75-120, wherein the modification of the target gene is ex vivo.

123. The method or use of any one of claims 5-10, 12-14, 19-67, and 75-122, wherein the modification of the target gene reduces or eliminates expression of the target gene.

124. The method or use of any one of claims 5-10, 12-14, 19-67, and 75-123, wherein the genome editing or modification of the target gene reduces expression of the target gene by at least 50%, 55%, 60%, 65%, 70%, 75%, 80%, 85%, 90%, or 95%.

125. The method or use of any one of claims 5-10, 12-14, 19-67, and 75-124, wherein the genome editing or modification of the target gene produces a missense mutation in the gene.

126. A polypeptide comprising a cytidine deaminase and an RNA-guided nickase, wherein the polypeptide does not comprise a uracil glycosylase inhibitor (UGI).

127. A ribonucleoprotein complex (RNP) comprising the polypeptide of claim 126 and a guide RNA, wherein if the RNP comprises a SpyCas9 nickase, then the guide RNA is a Spy guide RNA, and wherein if the RNP comprises a NmeCas nickase, then the guide RNA is a Nme guide RNA.

128. A composition comprising a first polypeptide comprising a cytidine deaminase and an RNA-guided nickase, wherein the first polypeptide does not comprise a uracil glycosylase inhibitor (UGI), and a second polypeptide comprising a UGI, wherein the second polypeptide is different from the first polypeptide.

129. The polypeptide, RNP, or composition of any one of claims 126-128, wherein the cytidine deaminase is fused to the RNA-guided nickase via a peptide linker, optionally XTEN or a peptide linker comprising a sequence of GTKDSTKDIPETPSKD (SEQ ID NO: 268).

130. The polypeptide, RNP, or composition of any one of claims 126-128, wherein the cytidine deaminase is attached to a linker comprising an organic molecule, polymer, or chemical moiety.

131. A pharmaceutical composition comprising the mRNA, RNP, composition, or polypeptide of claims 1-4, 8-11, 19-69, 74, and 126-130 and a pharmaceutically acceptable carrier.

132. A kit comprising the mRNA, RNP, composition, or polypeptide of any of 1-4, 8-11, 19-69, 74, and 126-130.

133. The mRNA, RNP, composition, method, use, cell, or engineered cell of any one of 1-132, wherein the polypeptide comprising a cytidine deaminase and an RNA-guided nickase includes: the cytidine deaminase, a linker, and the RNA-guided nickase in amino to carboxy terminal order.

134. A method of altering a DNA sequence within a TRAC gene, comprising delivering to a cell:
a. a gRNA comprising a guide sequence chosen from: i) SEQ ID NOs: 706-721; ii) at least 17, 18, 19, or 20 contiguous nucleotides of a sequence selected from SEQ ID NOs: 706-721; iii) a guide sequence at least 95%, 90%, or 85% identical to a sequence selected from SEQ ID NOs: 706-721; iv) a sequence that comprises 10 contiguous nucleotides±10 nucleotides of a genomic coordinate listed in Table 5A; v) at least 17, 18, 19, or 20 contiguous nucleotides of a sequence from (iv); or vi) a guide sequence that is at least 95%, 90%, or 85% identical to a sequence selected from (v); or
b. a nucleic acid encoding a gRNA of (a.).

135. A method of reducing the expression of a TRAC gene, comprising delivering to a cell:
a. a gRNA comprising a guide sequence chosen from: i) SEQ ID NOs: 706-721; ii) at least 17, 18, 19, or 20 contiguous nucleotides of a sequence selected from SEQ ID NOs: 706-721; iii) a guide sequence at least 95%, 90%, or 85% identical to a sequence selected from SEQ ID NOs: 706-721; iv) a sequence that comprises 10 contiguous nucleotides±10 nucleotides of a genomic coordinate listed in Table 5A; v) at least 17, 18, 19, or 20 contiguous nucleotides of a sequence from (iv); or vi) a guide sequence that is at least 95%, 90%, or 85% identical to a sequence selected from (v); or
b. a nucleic acid encoding a gRNA of (a.).

136. A method of immunotherapy comprising administering a composition comprising an engineered cell to a subject,
wherein the cell comprises a genomic modification of at least one nucleotide within the genomic coordinates selected from:
chr14: 22547596-22547616; chr14: 22550570-22550590; chr14: 22547763-22547783; chr14: 22550596-22550616; chr14: 22550566-22550586; chr14: 22547753-22547773; chr14: 22550601-22550621; chr14: 22550599-22550619; chr14: 22547583-22547603; chr14: 22547671-22547691; chr14: 22547770-22547790; chr14: 22547676-22547696; chr14: 22547772-22547792; chr14: 22547771-22547791; chr14: 22547733-22547753; chr14: 22547776-22547796; or
wherein the cell is engineered by delivering to the cell:
a. a gRNA comprising a guide sequence chosen from: i) SEQ ID NOs: 706-721; ii) at least 17, 18, 19, or 20 contiguous nucleotides of a sequence selected from SEQ ID NOs: 706-721; iii) a guide sequence at least 95%, 90%, or 85% identical to a sequence selected from SEQ ID NOs: 706-721; iv) a sequence that comprises 10 contiguous nucleotides±10 nucleotides of a genomic coordinate listed in Table 5A; v) at least 17, 18, 19, or 20 contiguous nucleotides of a sequence from (iv); or vi) a guide sequence that is at least 95%, 90%, or 85% identical to a sequence selected from (v); or
b. a nucleic acid encoding a gRNA of (a.).

137. A method of altering a DNA sequence within a TRBC1 and/or TRBC2 gene, comprising delivering a composition to a cell, wherein the composition comprises:
a. a gRNA comprising a guide sequence chosen from: i) SEQ ID NOs: 618-669; ii) at least 17, 18, 19, or 20 contiguous nucleotides of a sequence selected from SEQ ID NOs: 618-669; iii) a guide sequence at least 95%, 90%, or 85% identical to a sequence selected from SEQ ID NOs: 618-669; iv) a sequence that comprises 10 contiguous nucleotides±10 nucleotides of a genomic coordinate listed in Table 5B; v) at least 17, 18, 19, or 20 contiguous nucleotides of a sequence from (iv); or vi) a guide sequence that is at least 95%, 90%, or 85% identical to a sequence selected from (v); or
b. a nucleic acid encoding a guide RNA of (a.).

138. A method of reducing the expression of a TRBC1 and/or TRBC2 gene, comprising delivering a composition to a cell, wherein the composition comprises:
a. a gRNA comprising a guide sequence chosen from: i) SEQ ID NOs: 618-669; ii) at least 17, 18, 19, or 20 contiguous nucleotides of a sequence selected from SEQ ID NOs: 618-669; iii) a guide sequence at least 95%, 90%, or 85% identical to a sequence selected from SEQ ID NOs: 618-669; iv) a sequence that comprises 10 contiguous nucleotides±10 nucleotides of a genomic coordinate listed in Table 5B; v) at least 17, 18, 19, or 20 contiguous nucleotides of a sequence from (iv); or vi) a guide sequence that is at least 95%, 90%, or 85% identical to a sequence selected from (v); or
b. a nucleic acid encoding a guide RNA of (a.).

139. A method of immunotherapy comprising administering a composition comprising an engineered cell to a subject,
wherein the cell comprises a modification of at least one nucleotide within the genomic coordinates selected from: chr7: 142791757-142791777; chr7: 142801104-142801124; chr7: 142791811-142791831; chr7: 142801158-142801178; chr7: 142792728-142792748; chr7: 142791719-142791739; chr7: 142791766-142791786; chr7: 142801113-142801133; chr7: 142791928-142791948; chr7: 142801275-142801295; chr7: 142792062-142792082; chr7: 142801409-142801429; chr7: 142792713-142792733; chr7: 142802126-142802146; chr7: 142791808-142791828; chr7: 142801155-142801175; chr7: 142792003-142792023; chr7: 142801350-142801370; chr7: 142791760-142791780; chr7: 142791715-142791735; chr7: 142792781-142792801; chr7: 142792040-142792060; chr7: 142801387-142801407; chr7: 142791862-142791882; chr7: 142791716-142791736; chr7: 142791787-142791807; chr7: 142791759-142791779; chr7: 142801106-142801126; chr7: 142791807-142791827; chr7: 142801154-142801174; chr7: 142791879-142791899; chr7: 142801226-142801246; chr7: 142791805-142791825; chr7: 142791700-142791720; chr7: 142791765-142791785; chr7: 142801112-142801132; chr7: 142791820-142791840; chr7: 142791872-142791892; chr7: 142801219-142801239; chr7: 142791700-142791720; chr7: 142791806-142791826; chr7: 142801153-142801173; chr7: 142792035-142792055; chr7: 142792724-142792744; chr7: 142792754-142792774; chr7: 142791804-142791824; chr7: 142792684-142792704; chr7: 142791823-142791843; chr7: 142792728-142792748; chr7: 142792721-142792741; chr7: 142792749-142792769; chr7: 142792685-142792705; chr7: 142791816-142791836; chr7: 142801163-142801183; chr7: 142792686-142792706; chr7: 142791793-142791813; chr7: 142793110-142793130; chr7: 142791815-142791835; chr7: 142801162-142801182; chr7: 142792770-142792790; chr7: 142792047-142792067; chr7: 142801394-142801414; chr7: 142791871-142791891; chr7: 142801218-142801238; chr7: 142791894-142791914; chr7: 142792723-142792743; chr7: 142792724-142792744; chr7: 142791897-142791917; chr7: 142801244-142801264; chr7: 142792757-142792777; chr7: 142792740-142792760; chr7: 142792758-142792778; or
wherein the cell is engineered by delivering to a cell:
a. a gRNA comprising a guide sequence chosen from: i) SEQ ID NOs: 618-669; ii) at least 17, 18, 19, or 20 contiguous nucleotides of a sequence selected from SEQ ID NOs: 618-669; iii) a guide sequence at least 95%, 90%, or 85% identical to a sequence selected from SEQ ID NOs: 618-669; iv) a sequence that comprises 10 contiguous nucleotides±10 nucleotides of a genomic coordinate listed in Table 5B; v) at least 17, 18, 19, or 20 contiguous nucleotides of a sequence from (iv); or vi) a guide sequence that is at least 95%, 90%, or 85% identical to a sequence selected from (v); or
b. a nucleic acid encoding a guide RNA of (a.).

140. A composition comprising:
a. a gRNA comprising a guide sequence chosen from: i) SEQ ID NOs: 706-721; ii) at least 17, 18, 19, or 20 contiguous nucleotides of a sequence selected from SEQ ID NOs: 706-721; iii) a guide sequence at least 95%, 90%, or 85% identical to a sequence selected from SEQ ID NOs: 706-721; iv) a sequence that comprises 10 contiguous nucleotides±10 nucleotides of a genomic coordinate listed in Table 5A; v) at least 17, 18, 19, or 20 contiguous nucleotides of a sequence from (iv); or vi) a guide sequence that is at least 95%, 90%, or 85% identical to a sequence selected from (v); and optionally
b. the mRNA or composition of any one of the preceding claims relating to mRNA or compositions.

141. A composition comprising:
a. a gRNA comprising a guide sequence chosen from: i) SEQ ID NOs: 618-669; ii) at least 17, 18, 19, or 20 contiguous nucleotides of a sequence selected from SEQ ID NOs: 618-669; iii) a guide sequence at least 95%, 90%, or 85% identical to a sequence selected from SEQ ID NOs: 618-669; iv) a sequence that comprises 10 contiguous nucleotides±10 nucleotides of a genomic coordinate listed in Table 5B; v) at least 17, 18, 19, or 20 contiguous nucleotides of a sequence from (iv); or vi) a guide sequence that is at least 95%, 90%, or 85% identical to a sequence selected from (v); and optionally
b. the mRNA or composition of any one of the preceding claims relating to mRNA or compositions.

142. An engineered cell which has reduced or eliminated surface expression of TRAC, comprising a genetic modification in a human TRAC gene, wherein the genetic modification comprises a modification of at least one nucleotide within the genomic coordinates selected from:
chr14: 22547596-22547616; chr14: 22550570-22550590; chr14: 22547763-22547783; chr14: 22550596-22550616; chr14: 22550566-22550586; chr14: 22547753-22547773; chr14: 22550601-22550621; chr14: 22550599-22550619; chr14: 22547583-22547603; chr14: 22547671-22547691; chr14: 22547770-22547790; chr14: 22547676-22547696; chr14: 22547772-22547792; chr14: 22547771-22547791; chr14: 22547733-22547753; chr14: 22547776-22547796.

143. An engineered cell which has reduced or eliminated surface expression of TRBC1/2, comprising a genetic modification in a human TRBC1/2 gene, wherein the genetic modification comprises a modification of at least one nucleotide within the genomic coordinates selected from:
chr7: 142791757-142791777; chr7: 142801104-142801124; chr7: 142791811-142791831; chr7: 142801158-142801178; chr7: 142792728-142792748; chr7: 142791719-142791739; chr7: 142791766-142791786; chr7: 142801113-142801133; chr7: 142791928-142791948; chr7: 142801275-142801295; chr7: 142792062-142792082; chr7: 142801409-142801429; chr7: 142792713-142792733; chr7: 142802126-142802146; chr7: 142791808-142791828; chr7: 142801155-142801175; chr7: 142792003-142792023; chr7: 142801350-142801370; chr7: 142791760-142791780; chr7: 142791715-142791735; chr7: 142792781-142792801; chr7: 142792040-142792060; chr7: 142801387-142801407; chr7: 142791862-142791882; chr7: 142791716-142791736; chr7: 142791787-142791807; chr7: 142791759-142791779; chr7: 142801106-142801126; chr7: 142791807-142791827; chr7: 142801154-142801174; chr7: 142791879-142791899; chr7: 142801226-142801246; chr7: 142791805-142791825; chr7: 142791700-142791720; chr7: 142791765-142791785; chr7: 142801112-142801132; chr7: 142791820-142791840; chr7: 142791872-142791892; chr7: 142801219-142801239; chr7: 142791700-142791720; chr7: 142791806-142791826; chr7: 142801153-142801173; chr7: 142792035-142792055; chr7: 142792724-142792744; chr7: 142792754-142792774; chr7: 142791804-142791824; chr7: 142792684-142792704; chr7: 142791823-142791843; chr7: 142792728-142792748; chr7: 142792721-142792741; chr7: 142792749-142792769; chr7: 142792685-142792705; chr7: 142791816-142791836; chr7: 142801163-142801183; chr7: 142792686-142792706; chr7: 142791793-142791813; chr7: 142793110-142793130; chr7: 142791815-142791835; chr7: 142801162-142801182; chr7: 142792770-142792790; chr7: 142792047-142792067; chr7: 142801394-142801414; chr7: 142791871-142791891; chr7: 142801218-142801238; chr7: 142791894-142791914; chr7: 142792723-142792743; chr7: 142792724-142792744; chr7: 142791897-142791917; chr7: 142801244-142801264; chr7: 142792757-142792777; chr7: 142792740-142792760; chr7: 142792758-142792778.

144. A lipid nucleic acid assembly composition comprising an mRNA comprising an open reading frame encoding a polypeptide comprising a cytidine deaminase and an RNA-guided nickase, wherein the polypeptide does not comprise a uracil glycosylase inhibitor (UGI).

145. One or more lipid nucleic acid assembly compositions, optionally lipid nanoparticles, comprising:
(a) a first mRNA comprising a first open reading frame encoding a polypeptide comprising a cytidine deaminase and an RNA-guided nickase;
(b) a second mRNA comprising a second open reading frame encoding a uracil glycosylase inhibitor (UGI); and
(c) one or more guide RNAs.

146. The method, cell, or engineered cell of any one of claims 134-143, wherein the cell is an immune cell, a lymphocyte, or a T cell.
